United States Patent Application Publication US 2026/0250646 A1, published August 27, 2026 (application 18/861,783).

The application's sequence listing, which the Patent Office published only in electronic form, follows.

SEQUENCE LISTING (1530 sequences)

SEQ ID NO: 1 - DNA, 4107 bp, Streptococcus pyogenes
  source 1..4107: mol_type = genomic DNA
atggataagaaatactcaataggcttagatatcggcacaaatagcgtcggatgggcggtgatcactgatgaatataaggttccgtctaaaaagttcaaggttctgggaaatacagaccgccacagtatcaaaaaaaatcttataggggctcttttatttgacagtggagagacagcggaagcgactcgtctcaaacggacagctcgtagaaggtatacacgtcggaagaatcgtatttgttatctacaggagattttttcaaatgagatggcgaaagtagatgatagtttctttcatcgacttgaagagtcttttttggtggaagaagacaagaagcatgaacgtcatcctatttttggaaatatagtagatgaagttgcttatcatgagaaatatccaactatctatcatctgcgaaaaaaattggtagattctactgataaagcggatttgcgcttaatctatttggccttagcgcatatgattaagtttcgtggtcattttttgattgagggagatttaaatcctgataatagtgatgtggacaaactatttatccagttggtacaaacctacaatcaattatttgaagaaaaccctattaacgcaagtggagtagatgctaaagcgattctttctgcacgattgagtaaatcaagacgattagaaaatctcattgctcagctccccggtgagaagaaaaatggcttatttgggaatctcattgctttgtcattgggtttgacccctaattttaaatcaaattttgatttggcagaagatgctaaattacagctttcaaaagatacttacgatgatgatttagataatttattggcgcaaattggagatcaatatgctgatttgtttttggcagctaagaatttatcagatgctattttactttcagatatcctaagagtaaatactgaaataactaaggctcccctatcagcttcaatgattaaacgctacgatgaacatcatcaagacttgactcttttaaaagctttagttcgacaacaacttccagaaaagtataaagaaatcttttttgatcaatcaaaaaacggatatgcaggttatattgatgggggagctagccaagaagaattttataaatttatcaaaccaattttagaaaaaatggatggtactgaggaattattggtgaaactaaatcgtgaagatttgctgcgcaagcaacggacctttgacaacggctctattccccatcaaattcacttgggtgagctgcatgctattttgagaagacaagaagacttttatccatttttaaaagacaatcgtgagaagattgaaaaaatcttgacttttcgaattccttattatgttggtccattggcgcgtggcaatagtcgttttgcatggatgactcggaagtctgaagaaacaattaccccatggaattttgaagaagttgtcgataaaggtgcttcagctcaatcatttattgaacgcatgacaaactttgataaaaatcttccaaatgaaaaagtactaccaaaacatagtttgctttatgagtattttacggtttataacgaattgacaaaggtcaaatatgttactgaaggaatgcgaaaaccagcatttctttcaggtgaacagaagaaagccattgttgatttactcttcaaaacaaatcgaaaagtaaccgttaagcaattaaaagaagattatttcaaaaaaatagaatgttttgatagtgttgaaatttcaggagttgaagatagatttaatgcttcattaggtacctaccatgatttgctaaaaattattaaagataaagattttttggataatgaagaaaatgaagatatcttagaggatattgttttaacattgaccttatttgaagatagggagatgattgaggaaagacttaaaacatatgctcacctctttgatgataaggtgatgaaacagcttaaacgtcgccgttatactggttggggacgtttgtctcgaaaattgattaatggtattagggataagcaatctggcaaaacaatattagattttttgaaatcagatggttttgccaatcgcaattttatgcagctgatccatgatgatagtttgacatttaaagaagacattcaaaaagcacaagtgtctggacaaggcgatagtttacatgaacatattgcaaatttagctggtagccctgctattaaaaaaggtattttacagactgtaaaagttgttgatgaattggtcaaagtaatggggcggcataagccagaaaatatcgttattgaaatggcacgtgaaaatcagacaactcaaaagggccagaaaaattcgcgagagcgtatgaaacgaatcgaagaaggtatcaaagaattaggaagtcagattcttaaagagcatcctgttgaaaatactcaattgcaaaatgaaaagctctatctctattatctccaaaatggaagagacatgtatgtggaccaagaattagatattaatcgtttaagtgattatgatgtcgatcacattgttccacaaagtttccttaaagacgattcaatagacaataaggtcttaacgcgttctgataaaaatcgtggtaaatcggataacgttccaagtgaagaagtagtcaaaaagatgaaaaactattggagacaacttctaaacgccaagttaatcactcaacgtaagtttgataatttaacgaaagctgaacgtggaggtttgagtgaacttgataaagctggttttatcaaacgccaattggttgaaactcgccaaatcactaagcatgtggcacaaattttggatagtcgcatgaatactaaatacgatgaaaatgataaacttattcgagaggttaaagtgattaccttaaaatctaaattagtttctgacttccgaaaagatttccaattctataaagtacgtgagattaacaattaccatcatgcccatgatgcgtatctaaatgccgtcgttggaactgctttgattaagaaatatccaaaacttgaatcggagtttgtctatggtgattataaagtttatgatgttcgtaaaatgattgctaagtctgagcaagaaataggcaaagcaaccgcaaaatatttcttttactctaatatcatgaacttcttcaaaacagaaattacacttgcaaatggagagattcgcaaacgccctctaatcgaaactaatggggaaactggagaaattgtctgggataaagggcgagattttgccacagtgcgcaaagtattgtccatgccccaagtcaatattgtcaagaaaacagaagtacagacaggcggattctccaaggagtcaattttaccaaaaagaaattcggacaagcttattgctcgtaaaaaagactgggatccaaaaaaatatggtggttttgatagtccaacggtagcttattcagtcctagtggttgctaaggtggaaaaagggaaatcgaagaagttaaaatccgttaaagagttactagggatcacaattatggaaagaagttcctttgaaaaaaatccgattgactttttagaagctaaaggatataaggaagttaaaaaagacttaatcattaaactacctaaatatagtctttttgagttagaaaacggtcgtaaacggatgctggctagtgccggagaattacaaaaaggaaatgagctggctctgccaagcaaatatgtgaattttttatatttagctagtcattatgaaaagttgaagggtagtccagaagataacgaacaaaaacaattgtttgtggagcagcataagcattatttagatgagattattgagcaaatcagtgaattttctaagcgtgttattttagcagatgccaatttagataaagttcttagtgcatataacaaacatagagacaaaccaatacgtgaacaagcagaaaatattattcatttatttacgttgacgaatcttggagctcccgctgcttttaaatattttgatacaacaattgatcgtaaacgatatacgtctacaaaagaagttttagatgccactcttatccatcaatccatcactggtctttatgaaacacgcattgatttgagtcagctaggaggtgactga

SEQ ID NO: 2 - protein, 1368 aa, Streptococcus pyogenes [sequence omitted]

SEQ ID NO: 3 - protein, 1053 aa, Synthetic construct
MKRNYILGLDIGITSVGYGIIDYETRDVIDAGVRLFKEANVENNEGRRSKRGARRLKRRRRHRIQRVKKLLFDYNLLTDHSELSGINPYEARVKGLSQKLSEEEFSAALLHLAKRRGVHNVNEVEEDTGNELSTKEQISRNSKALEEKYVAELQLERLKKDGEVRGSINRFKTSDYVKEAKQLLKVQKAYHQLDQSFIDTYIDLLETRRTYYEGPGEGSPFGWKDIKEWYEMLMGHCTYFPEELRSVKYAYNADLYNALNDLNNLVITRDENEKLEYYEKFQIIENVFKQKKKPTLKQIAKEILVNEEDIKGYRVTSTGKPEFTNLKVYHDIKDITARKEIIENAELLDQIAKILTIYQSSEDIQEELTNLNSELTQEEIEQISNLKGYTGTHNLSLKAINLILDELWHTNDNQIAIFNRLKLVPKKVDLSQQKEIPTTLVDDFILSPVVKRSFIQSIKVINAIIKKYGLPNDIIIELAREKNSKDAQKMINEMQKRNRQTNERIEEIIRTTGKENAKYLIEKIKLHDMQEGKCLYSLEAIPLEDLLNNPFNYEVDHIIPRSVSFDNSFNNKVLVKQEENSKKGNRTPFQYLSSSDSKISYETFKKHILNLAKGKGRISKTKKEYLLEERDINRFSVQKDFINRNLVDTRYATRGLMNLLRSYFRVNNLDVKVKSINGGFTSFLRRKWKFKKERNKGYKHHAEDALIIANADFIFKEWKKLDKAKKVMENQMFEEKQAESMPEIETEQEYKEIFITPHQIKHIKDFKDYKYSHRVDKKPNRELINDTLYSTRKDDKGNTLIVNNLNGLYDKDNDKLKKLINKSPEKLLMYHHDPQTYQKLKLIMEQYGDEKNPLYKYYEETGNYLTKYSKKDNGPVIKKIKYYGNKLNAHLDITDDYPNSRNKVVKLSLKPYRFDVYLDNGVYKFVTVKNLDVIKKENYYEVNSKCYEEAKKLKKISNQAEFIASFYNNDLIKINGELYRVIGVNNDLLNRIEVNMIDITYREYLENMNDKRPPRIIKTIASKTQSIKKYSTDILGNLYEVKSKKHPQIIKKG

SEQ ID NO: 4 - protein, 1300 aa, unidentified
  source 1..1300: note = Franscisella novicida
MSIYQEFVNKYSLSKTLRFELIPQGKTLENIKARGLILDDEKRAKDYKKAKQIIDKYHQFFIEEILSSVCISEDLLQNYSDVYFKLKKSDDDNLQKDFKSAKDTIKKQISEYIKDSEKFKNLFNQNLIDAKKGQESDLILWLKQSKDNGIELFKANSDITDIDEALEIIKSFKGWTTYFKGFHENRKNVYSSNDIPTSIIYRIVDDNLPKFLENKAKYESLKDKAPEAINYEQIKKDLAEELTFDIDYKTSEVNQRVFSLDEVFEIANFNNYLNQSGITKFNTIIGGKFVNGENTKRKGINEYINLYSQQINDKTLKKYKMSVLFKQILSDTESKSFVIDKLEDDSDVVTTMQSFYEQIAAFKTVEEKSIKETLSLLFDDLKAQKLDLSKIYFKNDKSLTDLSQQVFDDYSVIGTAVLEYITQQIAPKNLDNPSKKEQELIAKKTEKAKYLSLETIKLALEEFNKHRDIDKQCRFEEILANFAAIPMIFDEIAQNKDNLAQISIKYQNQGKKDLLQASAEDDVKAIKDLLDQTNNLLHKLKIFHISQSEDKANILDKDEHFYLVFEECYFELANIVPLYNKIRNYITQKPYSDEKFKLNFENSTLANGWDKNKEPDNTAILFIKDDKYYLGVMNKKNNKIFDDKAIKENKGEGYKKIVYKLLPGANKMLPKVFFSAKSIKFYNPSEDILRIRNHSTHTKNGSPQKGYEKFEFNIEDCRKFIDFYKQSISKHPEWKDFGFRFSDTQRYNSIDEFYREVENQGYKLTFENISESYIDSVVNQGKLYLFQIYNKDFSAYSKGRPNLHTLYWKALFDERNLQDVVYKLNGEAELFYRKQSIPKKITHPAKEAIANKNKDNPKKESVFEYDLIKDKRFTEDKFFFHCPITINFKSSGANKFNDEINLLLKEKANDVHILSIDRGERHLAYYTLVDGKGNIIKQDTFNIIGNDRMKTNYHDKLAAIEKDRDSARKDWKKINNIKEMKEGYLSQVVHEIAKLVIEYNAIVVFEDLNFGFKRGRFKVEKQVYQKLEKMLIEKLNYLVFKDNEFDKTGGVLRAYQLTAPFETFKKMGKQTGIIYYVPAGFTSKICPVTGFVNQLYPKYESVSKSQEFFSKFDKICYNLDKGYFEFSFDYKNFGDKAAKGKWTIASFGSRLINFRNSDKNHNWDTREVYPTKELEKLLKDYSIEYGHGECIKAAICGESDKKFFAKLTSVLNTILQMRNSKTGTELDYLISPVADVNGNFFDSRQAPKNMPQDADANGAYHIGLKGLMLLGRIKNNQEGKKLNLVIKNEEYFEFVQNRNN

SEQ ID NO: 5 - protein, 986 aa, Synthetic construct
MEKRINKIRKKLSADNATKPVSRSGPMKTLLVRVMTDDLKKRLEKRRKKPEVMPQVISNNAANNLRMLLDDYTKMKEAILQVYWQEFKDDHVGLMCKFAQPASKKIDQNKLKPEMDEKGNLTTAGFACSQCGQPLFVYKLEQVSEKGKAYTNYFGRCNVAEHEKLILLAQLKPEKDSDEAVTYSLGKFGQRALDFYSIHVTKESTHPVKPLAQIAGNRYASGPVGKALSDACMGTIASFLSKYQDIIIEHQKVVKGNQKRLESLRELAGKENLEYPSVTLPPQPHTKEGVDAYNEVIARVRMWVNLNLWQKLKLSRDDAKPLLRLKGFPSFPVVERRENEVDWWNTINEVKKLIDAKRDMGRVFWSGVTAEKRNTILEGYNYLPNENDHKKREGSLENPKKPAKRQFGDLLLYLEKKYAGDWGKVFDEAWERIDKKIAGLTSHIEREEARNAEDAQSKAVLTDWLRAKASFVLERLKEMDEKEFYACEIQLQKWYGDLRGNPFAVEAENRVVDISGFSIGSDGHSIQYRNLLAWKYLENGKREFYLLMNYGKKGRIRFTDGTDIKKSGKWQGLLYGGGKAKVIDLTFDPDDEQLIILPLAFGTRQGREFIWNDLLSLETGLIKLANGRVIEKTIYNKKIGRDEPALFVALTFERREVVDPSNIKPVNLIGVDRGENIPAVIALTDPEGCPLPEFKDSSGGPTDILRIGEGYKEKQRAIQAAKEVEQRRAGGYSRKFASKSRNLADDMVRNSARDLFYHAVTHDAVLVFENLSRGFGRQGKRTFMTERQYTKMEDWLTAKLAYEGLTSKTYLSKTLAQYTSKTCSNCGFTITTADYDGMLVRLKKTSDGWATTLNNKELKAEGQITYYNRYKRQTVEKELSAELDRLSEESGNNDISKWTKGRRDEALFLLKKRFSHRPVQEQFVCLDCGHEVHADEQAALNIARSWLFLNSNSTEFKSYKSGKQPFVGAWQAFYKRRLKEVWKPNA

SEQ ID NO: 6 - protein, 1125 aa, Synthetic construct
MRKKLFKGYILHNKRLVYTGKAAIRSIKYPLVAPNKTALNNLSEKIIYDYEHLFGPLNVASYARNSNRYSLVDFWIDSLRAGVIWQSKSTSLIDLISKLEGSKSPSEKIFEQIDFELKNKLDKEQFKDIILLNTGIRSSSNVRSLRGRFLKCFKEEFRDTEEVIACVDKWSKDLIVEGKSILVSKQFLYWEEEFGIKIFPHFKDNHDLPKLTFFVEPSLEFSPHLPLANCLERLKKFDISRESLLGLDNNFSAFSNYFNELFNLLSRGEIKKIVTAVLAVSKSWENEPELEKRLHFLSEKAKLLGYPKLTSSWADYRMIIGGKIKSWHSNYTEQLIKVREDLKKHQIALDKLQEDLKKVVDSSLREQIEAQREALLPLLDTMLKEKDFSDDLELYRFILSDFKSLLNGSYQRYIQTEEERKEDRDVTKKYKDLYSNLRNIPRFFGESKKEQFNKFINKSLPTIDVGLKILEDIRNALETVSVRKPPSITEEYVTKQLEKLSRKYKINAFNSNRFKQITEQVLRKYNNGELPKISEVFYRYPRESHVAIRILPVKISNPRKDISYLLDKYQISPDWKNSNPGEVVDLIEIYKLTLGWLLSCNKDFSMDFSSYDLKLFPEAASLIKNFGSCLSGYYLSKMIFNCITSEIKGMITLYTRDKFVVRYVTQMIGSNQKFPLLCLVGEKQTKNFSRNWGVLIEEKGDLGEEKNQEKCLIFKDKTDFAKAKEVEIFKNNIWRIRTSKYQIQFLNRLFKKTKEWDLMNLVLSEPSLVLEEEWGVSWDKDKLLPLLKKEKSCEERLYYSLPLNLVPATDYKEQSAEIEQRNTYLGLDVGEFGVAYAVVRIVRDRIELLSWGFLKDPALRKIRERVQDMKKKQVMAVFSSSSTAVARVREMAIHSLRNQIHSIALAYKAKIIYEISISNFETGGNRMAKIYRSIKVSDVYRESGADTLVSEMIWGKKNKQMGNHISSYATSYTCCNCARTPFELVIDNDKEYEKGGDEFIFNVGDEKKVRGFLQKSLLGKTIKGKEVLKSIKEYARPPIREVLLEGEDVEQLLKRRGNSYIYRCPFCGYKTDADIQAALNIACRGYISDNAKDAVKEGERKLDYILEVRKLWEKNGAVLRSAKFL

SEQ ID NO: 7 - protein, 707 aa, Synthetic construct
MADTPTLFTQFLRHHLPGQRFRKDILKQAGRILANKGEDATIAFLRGKSEESPPDFQPPVKCPIIACSRPLTEWPIYQASVAIQGYVYGQSLAEFEASDPGCSKDGLLGWFDKTGVCTDYFSVQGLNLIFQNARKRYIGVQTKVTNRNEKRHKKLKRINAKRIAEGLPELTSDEPESALDETGHLIDPPGLNTNIYCYQQVSPKPLALSEVNQLPTAYAGYSTSGDDPIQPMVTKDRLSISKGQPGYIPEHQRALLSQKKHRRMRGYGLKARALLVIVRIQDDWAVIDLRSLLRNAYWRRIVQTKEPSTITKLLKLVTGDPVLDATRMVATFTYKPGIVQVRSAKCLKNKQGSKLFSERYLNETVSVTSIDLGSNNLVAVATYRLVNGNTPELLQRFTLPSHLVKDFERYKQAHDTLEDSIQKTAVASLPQGQQTEIRMWSMYGFREAQERVCQELGLADGSIPWNVMTATSTILTDLFLARGGDPKKCMFTSEPKKKKNSKQVLYKIRDRAWAKMYRTLLSKETREAWNKALWGLKRGSPDYARLSKRKEELARRCVNYTISTAEKRAQCGRTIVALEDLNIGFFHGRGKQEPGWVGLFTRKKENRWLMQALHKAFLELAHHRGYHVIEVNPAYTSQTCPVCRHCDPDNRDQHNREAFHCIGCGFRGNADLDVATHNIAMVAITGESLKRARGSVASKTPQPLAAE

SEQ ID NO: 8 - protein, 426 aa, Synthetic construct
MIKVYRYEIVKPLDLDWKEFGTILRQLQQETRFALNKATQLAWEWMGFSSDYKDNHGEYPKSKDILGYTNVHGYAYHTIKTKAYRLNSGNLSQTIKRATDRFKAYQKEILRGDMSIPSYKRDIPLDLIKENISVNRMNHGDYIASLSLLSNPAKQEMNVKRKISVIIIVRGAGKTIMDRILSGEYQVSASQIIHDDRKNKWYLNISYDFEPQTRVLDLNKIMGIDLGVAVAVYMAFQHTPARYKLEGGEIENFRRQVESRRISMLRQGKYAGGARGGHGRDKRIKPIEQLRDKIANFRDTTNHRYSRYIVDMAIKEGCGTIQMEDLTNIRDIGSRFLQNWTYYDLQQKIIYKAEEAGIKVIKIDPQYTSQRCSECGNIDSGNRIGQAIFKCRACGYEANADYNAARNIAIPNIDKIIAESIKSGGS

SEQ ID NO: 9 - protein, 509 aa, Synthetic construct
NAMIAQKTIKIKLNPTKEQIIKLNSIIEEYIKVSNFTAKKIAEIQESFTDSGLTQGTCSECGKEKTYRKYHLLKKDNKLFCITCYKRKYSQFTLQKVEFQNKTGLRNVAKLPKTYYTNAIRFASDTFSGFDEIIKKKQNRLNSIQNRLNFWKELLYNPSNRNEIKIKVVKYAPKTDTREHPHYYSEAEIKGRIKRLEKQLKKFKMPKYPEFTSETISLQRELYSWKNPDELKISSITDKNESMNYYGKEYLKRYIDLINSQTPQILLEKENNSFYLCFPITKNIEMPKIDDTFEPVGIDWGITRNIAVVSILDSKTKKPKFVKFYSAGYILGKRKHYKSLRKHFGQKKRQDKINKLGTKEDRFIDSNIHKLAFLIVKEIRNHSNKPIILMENITDNREEAEKSMRQNILLHSVKSRLQNYIAYKALWNNIPTNLVKPEHTSQICNRCGHQDRENRPKGSKLFKCVKCNYMSNADFNASINIARKFYIGEYEPFYKDNEKMKSGVNSISM

SEQ ID NO: 10 - protein, 501 aa, Synthetic construct
MEVQKTVMKTLSLRILRPLYSQEIEKEIKEEEKERRKQAGGTGELDGGFYKKLEKKHSEMFSFDRLNLLLNQLQREIAKVYNHAISELYIATIAQGNKSNKHYISSIVYNRAYGYFYNAYIALGICSKVEANFRSNELLTQQSALPTAKSDNFPIVLHKQKGAEGEDGGFRISTEGSDLIFEIPIPFYEYNGENRKEPYKWVKKGGQKPVLKLILSTFRRQRNKGWAKDEGTDAEIRKVTEGKYQVSQIEINRGKKLGEHQKWFANFSIEQPIYERKPNRSIVGGLDVGIRSPLVCAINNSFSRYSVDSNDVFKFSKQVFAFRRRLLSKNSLKRKHGHAAHKLEPITEMTEKNDKFRKKIIERWAKEVTNFFVKNQVGIVQIEDLSTMKDREDHFFNQYLRGFWPYYQMQTLIENKLKEYGIEVKRVQAKYTSQLCSNPNCRYWNNYFNFEYRKVNKFPKFKCEKCNLEISADYNAARNLSTPDIEKFVAKATKGINLPEK

SEQ ID NO: 11 - protein, 582 aa, Synthetic construct
MKVLEFKIHPTEEQVSKIDQSLAACKLLWNLSIALKEESKQRYYRKKHKFDEFSPEIWGLSYSGHYDEKEFKTLKDKEKKLLIGNPCCKIAYFKKTSNGKEYTPLNSIPIRRFMNAENIDKDAVNYLNRKKLAFYFRENTAKFIGEIETEFKKGFFKSVIKPAYDAAKKGIRGIPRFKGRRDKVETLVNGQPETIKIKSNGVIVSSKIGLLKIRGLDRLQGKAPRMAKITRKATGYYLQLTIETDDTIYKESDKCVGLDMGAVAIFTDDLGRQSEAKRYAKIQKKRLNRLQRQASRQKDNSNNQRKTYAKLARVHEKIARQRKGRNAQLAHKITSEYQSVILEDLNLKNMTAAAKPKEREDGDGYKQNGKKRKSGLNKALLDNAIGQLRTFIENKANERGRKIIRVNPKHTSQTCPNCGNIDKANRVSQSKFKCVSCGYEAHADQNAAANILIRGLRDEFLRAIGSLYKFPVSMIGKYPGLAGEFTPDLDANQESIGDAPIENAEHSISKQMKQEGNRTPTQPENGSQSLIFLSAPPQPCGDSHGTNNPKALPNKASKRSSKKPRGAIPENPDQLTIWDLLD

SEQ ID NO: 12 - protein, 1368 aa, Synthetic construct
MDKKYSIGLAIGTNSVGWAVITDEYKVPSKKFKVLGNTDRHSIKKNLIGALLFDSGETAEATRLKRTARRRYTRRKNRICYLQEIFSNEMAKVDDSFFHRLEESFLVEEDKKHERHPIFGNIVDEVAYHEKYPTIYHLRKKLVDSTDKADLRLIYLALAHMIKFRGHFLIEGDLNPDNSDVDKLFIQLVQTYNQLFEENPINASGVDAKAILSARLSKSRRLENLIAQLPGEKKNGLFGNLIALSLGLTPNFKSNFDLAEDAKLQLSKDTYDDDLDNLLAQIGDQYADLFLAAKNLSDAILLSDILRVNTEITKAPLSASMIKRYDEHHQDLTLLKALVRQQLPEKYKEIFFDQSKNGYAGYIDGGASQEEFYKFIKPILEKMDGTEELLVKLNREDLLRKQRTFDNGSIPHQIHLGELHAILRRQEDFYPFLKDNREKIEKILTFRIPYYVGPLARGNSRFAWMTRKSEETITPWNFEEVVDKGASAQSFIERMTNFDKNLPNEKVLPKHSLLYEYFTVYNELTKVKYVTEGMRKPAFLSGEQKKAIVDLLFKTNRKVTVKQLKEDYFKKIECFDSVEISGVEDRFNASLGTYHDLLKIIKDKDFLDNEENEDILEDIVLTLTLFEDREMIEERLKTYAHLFDDKVMKQLKRRRYTGWGRLSRKLINGIRDKQSGKTILDFLKSDGFANRNFMQLIHDDSLTFKEDIQKAQVSGQGDSLHEHIANLAGSPAIKKGILQTVKVVDELVKVMGRHKPENIVIEMARENQTTQKGQKNSRERMKRIEEGIKELGSQILKEHPVENTQLQNEKLYLYYLQNGRDMYVDQELDINRLSDYDVDAIVPQSFLKDDSIDNKVLTRSDKNRGKSDNVPSEEVVKKMKNYWRQLLNAKLITQRKFDNLTKAERGGLSELDKAGFIKRQLVETRQITKHVAQILDSRMNTKYDENDKLIREVKVITLKSKLVSDFRKDFQFYKVREINNYHHAHDAYLNAVVGTALIKKYPKLESEFVYGDYKVYDVRKMIAKSEQEIGKATAKYFFYSNIMNFFKTEITLANGEIRKRPLIETNGETGEIVWDKGRDFATVRKVLSMPQVNIVKKTEVQTGGFSKESILPKRNSDKLIARKKDWDPKKYGGFDSPTVAYSVLVVAKVEKGKSKKLKSVKELLGITIMERSSFEKNPIDFLEAKGYKEVKKDLIIKLPKYSLFELENGRKRMLASAGELQKGNELALPSKYVNFLYLASHYEKLKGSPEDNEQKQLFVEQHKHYLDEIIEQISEFSKRVILADANLDKVLSAYNKHRDKPIREQAENIIHLFTLTNLGAPAAFKYFDTTIDRKRYTSTKEVLDATLIHQSITGLYETRIDLSQLGGD

SEQ ID NO: 13 - protein, 1053 aa, Synthetic construct
MKRNYILGLAIGITSVGYGIIDYETRDVIDAGVRLFKEANVENNEGRRSKRGARRLKRRRRHRIQRVKKLLFDYNLLTDHSELSGINPYEARVKGLSQKLSEEEFSAALLHLAKRRGVHNVNEVEEDTGNELSTKEQISRNSKALEEKYVAELQLERLKKDGEVRGSINRFKTSDYVKEAKQLLKVQKAYHQLDQSFIDTYIDLLETRRTYYEGPGEGSPFGWKDIKEWYEMLMGHCTYFPEELRSVKYAYNADLYNALNDLNNLVITRDENEKLEYYEKFQIIENVFKQKKKPTLKQIAKEILVNEEDIKGYRVTSTGKPEFTNLKVYHDIKDITARKEIIENAELLDQIAKILTIYQSSEDIQEELTNLNSELTQEEIEQISNLKGYTGTHNLSLKAINLILDELWHTNDNQIAIFNRLKLVPKKVDLSQQKEIPTTLVDDFILSPVVKRSFIQSIKVINAIIKKYGLPNDIIIELAREKNSKDAQKMINEMQKRNRQTNERIEEIIRTTGKENAKYLIEKIKLHDMQEGKCLYSLEAIPLEDLLNNPFNYEVDHIIPRSVSFDNSFNNKVLVKQEEASKKGNRTPFQYLSSSDSKISYETFKKHILNLAKGKGRISKTKKEYLLEERDINRFSVQKDFINRNLVDTRYATRGLMNLLRSYFRVNNLDVKVKSINGGFTSFLRRKWKFKKERNKGYKHHAEDALIIANADFIFKEWKKLDKAKKVMENQMFEEKQAESMPEIETEQEYKEIFITPHQIKHIKDFKDYKYSHRVDKKPNRELINDTLYSTRKDDKGNTLIVNNLNGLYDKDNDKLKKLINKSPEKLLMYHHDPQTYQKLKLIMEQYGDEKNPLYKYYEETGNYLTKYSKKDNGPVIKKIKYYGNKLNAHLDITDDYPNSRNKVVKLSLKPYRFDVYLDNGVYKFVTVKNLDVIKKENYYEVNSKCYEEAKKLKKISNQAEFIASFYNNDLIKINGELYRVIGVNNDLLNRIEVNMIDITYREYLENMNDKRPPRIIKTIASKTQSIKKYSTDILGNLYEVKSKKHPQIIKKG

SEQ ID NO: 14 - protein, 1300 aa, Synthetic construct
MSIYQEFVNKYSLSKTLRFELIPQGKTLENIKARGLILDDEKRAKDYKKAKQIIDKYHQFFIEEILSSVCISEDLLQNYSDVYFKLKKSDDDNLQKDFKSAKDTIKKQISEYIKDSEKFKNLFNQNLIDAKKGQESDLILWLKQSKDNGIELFKANSDITDIDEALEIIKSFKGWTTYFKGFHENRKNVYSSNDIPTSIIYRIVDDNLPKFLENKAKYESLKDKAPEAINYEQIKKDLAEELTFDIDYKTSEVNQRVFSLDEVFEIANFNNYLNQSGITKFNTIIGGKFVNGENTKRKGINEYINLYSQQINDKTLKKYKMSVLFKQILSDTESKSFVIDKLEDDSDVVTTMQSFYEQIAAFKTVEEKSIKETLSLLFDDLKAQKLDLSKIYFKNDKSLTDLSQQVFDDYSVIGTAVLEYITQQIAPKNLDNPSKKEQELIAKKTEKAKYLSLETIKLALEEFNKHRDIDKQCRFEEILANFAAIPMIFDEIAQNKDNLAQISIKYQNQGKKDLLQASAEDDVKAIKDLLDQTNNLLHKLKIFHISQSEDKANILDKDEHFYLVFEECYFELANIVPLYNKIRNYITQKPYSDEKFKLNFENSTLANGWDKNKEPDNTAILFIKDDKYYLGVMNKKNNKIFDDKAIKENKGEGYKKIVYKLLPGANKMLPKVFFSAKSIKFYNPSEDILRIRNHSTHTKNGSPQKGYEKFEFNIEDCRKFIDFYKQSISKHPEWKDFGFRFSDTQRYNSIDEFYREVENQGYKLTFENISESYIDSVVNQGKLYLFQIYNKDFSAYSKGRPNLHTLYWKALFDERNLQDVVYKLNGEAELFYRKQSIPKKITHPAKEAIANKNKDNPKKESVFEYDLIKDKRFTEDKFFFHCPITINFKSSGANKFNDEINLLLKEKANDVHILSIARGERHLAYYTLVDGKGNIIKQDTFNIIGNDRMKTNYHDKLAAIEKDRDSARKDWKKINNIKEMKEGYLSQVVHEIAKLVIEYNAIVVFEDLNFGFKRGRFKVEKQVYQKLEKMLIEKLNYLVFKDNEFDKTGGVLRAYQLTAPFETFKKMGKQTGIIYYVPAGFTSKICPVTGFVNQLYPKYESVSKSQEFFSKFDKICYNLDKGYFEFSFDYKNFGDKAAKGKWTIASFGSRLINFRNSDKNHNWDTREVYPTKELEKLLKDYSIEYGHGECIKAAICGESDKKFFAKLTSVLNTILQMRNSKTGTELDYLISPVADVNGNFFDSRQAPKNMPQDADANGAYHIGLKGLMLLGRIKNNQEGKKLNLVIKNEEYFEFVQNRNN

SEQ ID NO: 15 - protein, 1082 aa, Synthetic construct
MAAFKPNSINYILGLAIGIASVGWAMVEIDEEENPIRLIDLGVRVFERAEVPKTGDSLAMARRLARSVRRLTRRRAHRLLRTRRLLKREGVLQAANFDENGLIKSLPNTPWQLRAAALDRKLTPLEWSAVLLHLIKHRGYLSQRKNEGETADKELGALLKGVAGNAHALQTGDFRTPAELALNKFEKESGHIRNQRSDYSHTFSRKDLQAELILLFEKQKEFGNPHVSGGLKEGIETLLMTQRPALSGDAVQKMLGHCTFEPAEPKAAKNTYTAERFIWLTKLNNLRILEQGSERPLTDTERATLMDEPYRKSKLTYAQARKLLGLEDTAFFKGLRYGKDNAEASTLMEMKAYHAISRALEKEGLKDKKSPLNLSPELQDEIGTAFSLFKTDEDITGRLKDRIQPEILEALLKHISFDKFVQISLKALRRIVPLMEQGKRYDEACAEIYGDHYGKKNTEEKIYLPPIPADEIRNPVVLRALSQARKVINGVVRRYGSPARIHIETAREVGKSFKDRKEIEKRQEENRKDREKAAAKFREYFPNFVGEPKSKDILKLRLYEQQHGKCLYSGKEINLGRLNEKGYVEIDAALPFSRTWDDSFNNKVLVLGSENQNKGNQTPYEYFNGKDNSREWQEFKARVETSRFPRSKKQRILLQKFDEDGFKERNLNDTRYVNRFLCQFVADRMRLTGKGKKRVFASNGQITNLLRGFWGLRKVRAENDRHHALDAVVVACSTVAMQQKITRFVRYKEMNAFDGKTIDKETGEVLHQKTHFPQPWEFFAQEVMIRVFGKPDGKPEFEEADTLEKLRTLLAEKLSSRPEAVHEYVTPLFVSRAPNRKMSGQGHMETVKSAKRLDEGVSVLRVPLTQLKLKDLEKMVNREREPKLYEALKARLEAHKDDPAKAFAEPFYKYDKAGNRTQQVKAVRVEQVQKTGVWVRNHNGIADNATMVRVDVFEKGDKYYLVPIYSWQVAKGILPDRAVVQGKDEEDWQLIDDSFNFKFSLHPNDLVEVITKKARMFGYFASCHRGTGNINIRIHDLDHKIGKNGILEGIGVKTALSFQKYQIDELGKEIRPCRLKKRPPVR

SEQ ID NO: 16 - protein, 984 aa, Synthetic construct
MARILAFAIGISSIGWAFSENDELKDCGVRIFTKVENPKTGESLALPRRLARSARKRLARRKARLNHLKHLIANEFKLNYEDYQSFDESLAKAYKGSLISPYELRFRALNELLSKQDFARVILHIAKRRGYDDIKNSDDKEKGAILKAIKQNEEKLANYQSVGEYLYKEYFQKFKENSKEFTNVRNKKESYERCIAQSFLKDELKLIFKKQREFGFSFSKKFEEEVLSVAFYKRALKDFSHLVGNCSFFTDEKRAPKNSPLAFMFVALTRIINLLNNLKNTEGILYTKDDLNALLNEVLKNGTLTYKQTKKLLGLSDDYEFKGEKGTYFIEFKKYKEFIKALGEHNLSQDDLNEIAKDITLIKDEIKLKKALAKYDLNQNQIDSLSKLEFKDHLNISFKALKLVTPLMLEGKKYDEACNELNLKVAINEDKKDFLPAFNETYYKDEVTNPVVLRAIKEYRKVLNALLKKYGKVHKINIELAREVGKNHSQRAKIEKEQNENYKAKKDAELECEKLGLKINSKNILKLRLFKEQKEFCAYSGEKIKISDLQDEKMLEIDAIYPYSRSFDDSYMNKVLVFTKQNQEKLNQTPFEAFGNDSAKWQKIEVLAKNLPTKKQKRILDKNYKDKEQKNFKDRNLNDTRYIARLVLNYTKDYLDFLPLSDDENTKLNDTQKGSKVHVEAKSGMLTSALRHTWGFSAKDRNNHLHHAIDAVIIAYANNSIVKAFSDFKKEQESNSAELYAKKISELDYKNKRKFFEPFSGFRQKVLDKIDEIFVSKPERKKPSGALHEETFRKEEEFYQSYGGKEGVLKALELGKIRKVNGKIVKNGDMFRVDIFKHKKTNKFYAVPIYTMDFALKVLPNKAVARSKKGEIKDWILMDENYEFCFSLYKDSLILIQTKDMQEPEFVYYNAFTSSTVSLIVSKHDNKFETLSKNQKILFKNANEKEVIAKSIGIQNLKVFEKYIVSALGEVTKAEFRQREDFKK

SEQ ID NO: 17 - protein, 1122 aa, Synthetic construct
MGSDLVLGLAIGIGSVGVGILNKVTGEIIHKNSRIFPAAQAENNLVRRTNRQGRRLARRKKHRRVRLNRLFEESGLITDFTKISINLNPYQLRVKGLTDELSNEELFIALKNMVKHRGISYLDDASDDGNSSVGDYAQIVKENSKQLETKTPGQIQLERYQTYGQLRGDFTVEKDGKKHRLINVFPTSAYRSEALRILQTQQEFNPQITDEFINRYLEILTGKRKYYHGPGNEKSRTDYGRYRTSGETLDNIFGILIGKCTFYPDEFRAAKASYTAQEFNLLNDLNNLTVPTETKKLSKEQKNQIINYVKNEKAMGPAKLFKYIAKLLSCDVADIKGYRIDKSGKAEIHTFEAYRKMKTLETLDIEQMDRETLDKLAYVLTLNTEREGIQEALEHEFADGSFSQKQVDELVQFRKANSSIFGKGWHNFSVKLMMELIPELYETSEEQMTILTRLGKQKTTSSSNKTKYIDEKLLTEEIYNPVVAKSVRQAIKIVNAAIKEYGDFDNIVIEMARETNEDDEKKAIQKIQKANKDEKDAAMLKAANQYNGKAELPHSVFHGHKQLATKIRLWHQQGERCLYTGKTISIHDLINNSNQFEVDAILPLSITFDDSLANKVLVYATANQEKGQRTPYQALDSMDDAWSFRELKAFVRESKTLSNKKKEYLLTEEDISKFDVRKKFIERNLVDTRYASRVVLNALQEHFRAHKIDTKVSVVRGQFTSQLRRHWGIEKTRDTYHHHAVDALIIAASSQLNLWKKQKNTLVSYSEDQLLDIETGELISDDEYKESVFKAPYQHFVDTLKSKEFEDSILFSYQVDSKFNRKISDATIYATRQAKVGKDKADETYVLGKIKDIYTQDGYDAFMKIYKKDKSKFLMYRHDPQTFEKVIEPILENYPNKQINEKGKEVPCNPFLKYKEEHGYIRKYSKKGNGPEIKSLKYYDSKLGNHIDITPKDSNNKVVLQSVSPWRADVYFNKTTGKYEILGLKYADLQFEKGTGTYKISQEKYNDIKKKEGVDSDSEFKFTLYKNDLLLVKDTETKEQQLFRFLSRTMPKQKHYVELKPYDKQKFEGGEALIKVLGNVANSGQCKKGLGKSNISIYKVRTDVLGNQHIIKNEGDKPKLDF

SEQ ID NO: 18 - protein, 1388 aa, Synthetic construct
MTKPYSIGLAIGTNSVGWAVITDNYKVPSKKMKVLGNTSKKYIKKNLLGVLLFDSGITAEGRRLKRTARRRYTRRRNRILYLQEIFSTEMATLDDAFFQRLDDSFLVPDDKRDSKYPIFGNLVEEKVYHDEFPTIYHLRKYLADSTKKADLRLVYLALAHMIKYRGHFLIEGEFNSKNNDIQKNFQDFLDTYNAIFESDLSLENSKQLEEIVKDKISKLEKKDRILKLFPGEKNSGIFSEFLKLIVGNQADFRKCFNLDEKASLHFSKESYDEDLETLLGYIGDDYSDVFLKAKKLYDAILLSGFLTVTDNETEAPLSSAMIKRYNEHKEDLALLKEYIRNISLKTYNEVFKDDTKNGYAGYIDGKTNQEDFYVYLKNLLAEFEGADYFLEKIDREDFLRKQRTFDNGSIPYQIHLQEMRAILDKQAKFYPFLAKNKERIEKILTFRIPYYVGPLARGNSDFAWSIRKRNEKITPWNFEDVIDKESSAEAFINRMTSFDLYLPEEKVLPKHSLLYETFNVYNELTKVRFIAESMRDYQFLDSKQKKDIVRLYFKDKRKVTDKDIIEYLHAIYGYDGIELKGIEKQFNSSLSTYHDLLNIINDKEFLDDSSNEAIIEEIIHTLTIFEDREMIKQRLSKFENIFDKSVLKKLSRRHYTGWGKLSAKLINGIRDEKSGNTILDYLIDDGISNRNFMQLIHDDALSFKKKIQKAQIIGDEDKGNIKEVVKSLPGSPAIKKGILQSIKIVDELVKVMGGRKPESIVVEMARENQYTNQGKSNSQQRLKRLEKSLKELGSKILKENIPAKLSKIDNNALQNDRLYLYYLQNGKDMYTGDDLDIDRLSNYDIDHIIPQAFLKDNSIDNKVLVSSASARGKSDDFPSLEVVKKRKTFWYQLLKSKLISQRKFDNLTKAERGGLLPEDKAGFIQRQLVETRQITKHVARLLDEKFNNKKDENNRAVRTVKIITLKSTLVSQFRKDFELYKVREINDFHHAHDAYLNAVIASALLKKYPKLEPEFVYGDYPKYNSFRERKSATEKVYFYSNIMNIFKKSISLADGRVIERPLIEVNEETGESVWNKESDLATVRRVLSYPQVNVVKKVEEQNHGLDRGKPKGLFNANLSSKPKPNSNENLVGAKEYLDPKKYGGYAGISNSFAVLVKGTIEKGAKKKITNVLEFQGISILDRINYRKDKLNFLLEKGYKDIELIIELPKYSLFELSDGSRRMLASILSTNNKRGEIHKGNQIFLSQKFVKLLYHAKRISNTINENHRKYVENHKKEFEELFYYILEFNENYVGAKKNGKLLNSAFQSWQNHSIDELCSSFIGPTGSERKGLFELTSRGSAADFEFLGVKIPRYRDYTPSSLLKDATLIHQSVTGLYETRIDLAKLGEG

SEQ ID NO: 19 - protein, 1228 aa, Synthetic construct
MSKLEKFTNCYSLSKTLRFKAIPVGKTQENIDNKRLLVEDEKRAEDYKGVKKLLDRYYLSFINDVLHSIKLKNLNNYISLFRKKTRTEKENKELENLEINLRKEIAKAFKGNEGYKSLFKKDIIETILPEFLDDKDEIALVNSFNGFTTAFTGFFDNRENMFSEEAKSTSIAFRCINENLTRYISNMDIFEKVDAIFDKHEVQEIKEKILNSDYDVEDFFEGEFFNFVLTQEGIDVYNAIIGGFVTESGEKIKGLNEYINLYNQKTKQKLPKFKPLYKQVLSDRESLSFYGEGYTSDEEVLEVFRNTLNKNSEIFSSIKKLEKLFKNFDEYSSAGIFVKNGPAISTISKDIFGEWNVIRDKWNAEYDDIHLKKKAVVTEKYEDDRRKSFKKIGSFSLEQLQEYADADLSVVEKLKEIIIQKVDEIYKVYGSSEKLFDADFVLEKSLKKNDAVVAIMKDLLDSVKSFENYIKAFFGEGKETNRDESFYGDFVLAYDILLKVDHIYDAIRNYVTQKPYSKDKFKLYFQNPQFMGGWDKDKETDYRATILRYGSKYYLAIMDKKYAKCLQKIDKDDVNGNYEKINYKLLPGPNKMLPKVFFSKKWMAYYNPSEDIQKIYKNGTFKKGDMFNLNDCHKLIDFFKDSISRYPKWSNAYDFNFSETEKYKDIAGFYREVEEQGYKVSFESASKKEVDKLVEEGKLYMFQIYNKDFSDKSHGTPNLHTMYFKLLFDENNHGQIRLSGGAELFMRRASLKKEELVVHPANSPIANKNPDNPKKTTTLSYDVYKDKRFSEDQYELHIPIAINKCPKNIFKINTEVRVLLKHDDNPYVIGIARGERNLLYIVVVDGKGNIVEQYSLNEIINNFNGIRIKTDYHSLLDKKEKERFEARQNWTSIENIKELKAGYISQVVHKICELVEKYDAVIALEDLNSGFKNSRVKVEKQVYQKFEKMLIDKLNYMVDKKSNPCATGGALKGYQITNKFESFKSMSTQNGFIFYIPAWLTSKIDPSTGFVNLLKTKYTSIADSKKFISSFDRIMYVPEEDLFEFALDYKNFSRTDADYIKKWKLYSYGNRIRIFRNPKKNNVFDWEEVCLTSAYKELFNKYGINYQQGDIRALLCEQSDKAFYSSFMALMSLMLQMRNSITGRTDVDFLISPVKNSDGIFYDSRNYEAQENAILPKNADANGAYNIARKVLWAIGQFKKAEDEKLDKVKIAISNKEWLEYAQTSVKH

SEQ ID NO: 20 - protein, 1307 aa, Synthetic construct
MTQFEGFTNLYQVSKTLRFELIPQGKTLKHIQEQGFIEEDKARNDHYKELKPIIDRIYKTYADQCLQLVQLDWENLSAAIDSYRKEKTEETRNALIEEQATYRNAIHDYFIGRTDNLTDAINKRHAEIYKGLFKAELFNGKVLKQLGTVTTTEHENALLRSFDKFTTYFSGFYENRKNVFSAEDISTAIPHRIVQDNFPKFKENCHIFTRLITAVPSLREHFENVKKAIGIFVSTSIEEVFSFPFYNQLLTQTQIDLYNQLLGGISREAGTEKIKGLNEVLNLAIQKNDETAHIIASLPHRFIPLFKQILSDRNTLSFILEEFKSDEEVIQSFCKYKTLLRNENVLETAEALFNELNSIDLTHIFISHKKLETISSALCDHWDTLRNALYERRISELTGKITKSAKEKVQRSLKHEDINLQEIISAAGKELSEAFKQKTSEILSHAHAALDQPLPTTLKKQEEKEILKSQLDSLLGLYHLLDWFAVDESNEVDPEFSARLTGIKLEMEPSLSFYNKARNYATKKPYSVEKFKLNFQMPTLASGWDVNKEKNNGAILFVKNGLYYLGIMPKQKGRYKALSFEPTEKTSEGFDKMYYDYFPDAAKMIPKCSTQLKAVTAHFQTHTTPILLSNNFIEPLEITKEIYDLNNPEKEPKKFQTAYAKKTGDQKGYREALCKWIDFTRDFLSKYTKTTSIDLSSLRPSSQYKDLGEYYAELNPLLYHISFQRIAEKEIMDAVETGKLYLFQIYNKDFAKGHHGKPNLHTLYWTGLFSPENLAKTSIKLNGQAELFYRPKSRMKRMAHRLGEKMLNKKLKDQKTPIPDTLYQELYDYVNHRLSHDLSDEARALLPNVITKEVSHEIIKDRRFTSDKFFFHVPITLNYQAANSPSKFNQRVNAYLKEHPETPIIGIARGERNLIYITVIDSTGKILEQRSLNTIQQFDYQKKLDNREKERVAARQAWSVVGTIKDLKQGYLSQVIHEIVDLMIHYQAVVVLENLNFGFKSKRTGIAEKAVYQQFEKMLIDKLNCLVLKDYPAEKVGGVLNPYQLTDQFTSFAKMGTQSGFLFYVPAPYTSKIDPLTGFVDPFVWKTIKNHESRKHFLEGFDFLHYDVKTGDFILHFKMNRNLSFQRGLPGFMPAWDIVFEKNETQFDAKGTPFIAGKRIVPVIENHRFTGRYRDLYPANELIALLEEKGIVFRDGSNILPKLLENDDSHAIDTMVALIRSVLQMRNSNAATGEDYINSPVRDLNGVCFDSRFQNPEWPMDADANGAYHIALKGQLLLNHLKESKDLKLQNGISNQDWLAYIQELRN

SEQ ID NO: 21 - protein, 1307 aa, Synthetic construct
MTQFEGFTNLYQVSKTLRFELIPQGKTLKHIQEQGFIEEDKARNDHYKELKPIIDRIYKTYADQCLQLVQLDWENLSAAIDSYRKEKTEETRNALIEEQATYRNAIHDYFIGRTDNLTDAINKRHAEIYKGLFKAELFNGKVLKQLGTVTTTEHENALLRSFDKFTTYFSGFYRNRKNVFSAEDISTAIPHRIVQDNFPKFKENCHIFTRLITAVPSLREHFENVKKAIGIFVSTSIEEVFSFPFYNQLLTQTQIDLYNQLLGGISREAGTEKIKGLNEVLNLAIQKNDETAHIIASLPHRFIPLFKQILSDRNTLSFILEEFKSDEEVIQSFCKYKTLLRNENVLETAEALFNELNSIDLTHIFISHKKLETISSALCDHWDTLRNALYERRISELTGKITKSAKEKVQRSLKHEDINLQEIISAAGKELSEAFKQKTSEILSHAHAALDQPLPTTLKKQEEKEILKSQLDSLLGLYHLLDWFAVDESNEVDPEFSARLTGIKLEMEPSLSFYNKARNYATKKPYSVEKFKLNFQMPTLARGWDVNREKNNGAILFVKNGLYYLGIMPKQKGRYKALSFEPTEKTSEGFDKMYYDYFPDAAKMIPKCSTQLKAVTAHFQTHTTPILLSNNFIEPLEITKEIYDLNNPEKEPKKFQTAYAKKTGDQKGYREALCKWIDFTRDFLSKYTKTTSIDLSSLRPSSQYKDLGEYYAELNPLLYHISFQRIAEKEIMDAVETGKLYLFQIYNKDFAKGHHGKPNLHTLYWTGLFSPENLAKTSIKLNGQAELFYRPKSRMKRMAHRLGEKMLNKKLKDQKTPIPDTLYQELYDYVNHRLSHDLSDEARALLPNVITKEVSHEIIKDRRFTSDKFFFHVPITLNYQAANSPSKFNQRVNAYLKEHPETPIIGIARGERNLIYITVIDSTGKILEQRSLNTIQQFDYQKKLDNREKERVAARQAWSVVGTIKDLKQGYLSQVIHEIVDLMIHYQAVVVLENLNFGFKSKRTGIAEKAVYQQFEKMLIDKLNCLVLKDYPAEKVGGVLNPYQLTDQFTSFAKMGTQSGFLFYVPAPYTSKIDPLTGFVDPFVWKTIKNHESRKHFLEGFDFLHYDVKTGDFILHFKMNRNLSFQRGLPGFMPAWDIVFEKNETQFDAKGTPFIAGKRIVPVIENHRFTGRYRDLYPANELIALLEEKGIVFRDGSNILPKLLENDDSHAIDTMVALIRSVLQMRNSNAATGEDYINSPVRDLNGVCFDSRFQNPEWPMDADANGAYHIALKGQLLLNHLKESKDLKLQNGISNQDWLAYIQELRN

SEQ ID NO: 22 - protein, 1307 aa, Synthetic construct
MTQFEGFTNLYQVSKTLRFELIPQGKTLKHIQEQGFIEEDKARNDHYKELKPIIDRIYKTYADQCLQLVQLDWENLSAAIDSYRKEKTEETRNALIEEQATYRNAIHDYFIGRTDNLTDAINKRHAEIYKGLFKAELFNGKVLKQLGTVTTTEHENALLRSFDKFTTYFSGFYRNRKNVFSAEDISTAIPHRIVQDNFPKFKENCHIFTRLITAVPSLREHFENVKKAIGIFVSTSIEEVFSFPFYNQLLTQTQIDLYNQLLGGISREAGTEKIKGLNEVLALAIQKNDETAHIIASLPHRFIPLFKQILSDRNTLSFILEEFKSDEEVIQSFCKYKTLLRNENVLETAEALFNELNSIDLTHIFISHKKLETISSALCDHWDTLRNALYERRISELTGKITKSAKEKVQRSLKHEDINLQEIISAAGKELSEAFKQKTSEILSHAHAALDQPLPTTLKKQEEKEILKSQLDSLLGLYHLLDWFAVDESNEVDPEFSARLTGIKLEMEPSLSFYNKARNYATKKPYSVEKFKLNFQMPTLARGWDVNREKNNGAILFVKNGLYYLGIMPKQKGRYKALSFEPTEKTSEGFDKMYYDYFPDAAKMIPKCSTQLKAVTAHFQTHTTPILLSNNFIEPLEITKEIYDLNNPEKEPKKFQTAYAKKTGDQKGYREALCKWIDFTRDFLSKYTKTTSIDLSSLRPSSQYKDLGEYYAELNPLLYHISFQRIAEKEIMDAVETGKLYLFQIYNKDFAKGHHGKPNLHTLYWTGLFSPENLAKTSIKLNGQAELFYRPKSRMKRMAHRLGEKMLNKKLKDQKTPIPDTLYQELYDYVNHRLSHDLSDEARALLPNVITKEVSHEIIKDRRFTSDKFFFHVPITLNYQAANSPSKFNQRVNAYLKEHPETPIIGIARGERNLIYITVIDSTGKILEQRSLNTIQQFDYQKKLDNREKERVAARQAWSVVGTIKDLKQGYLSQVIHEIVDLMIHYQAVVVLENLNFGFKSKRTGIAEKAVYQQFEKMLIDKLNCLVLKDYPAEKVGGVLNPYQLTDQFTSFAKMGTQSGFLFYVPAPYTSKIDPLTGFVDPFVWKTIKNHESRKHFLEGFDFLHYDVKTGDFILHFKMNRNLSFQRGLPGFMPAWDIVFEKNETQFDAKGTPFIAGKRIVPVIENHRFTGRYRDLYPANELIALLEEKGIVFRDGSNILPKLLENDDSHAIDTMVALIRSVLQMRNSNAATGEDYINSPVRDLNGVCFDSRFQNPEWPMDADANGAYHIALKGQLLLNHLKESKDLKLQNGISNQDWLAYIQELRN

SEQ ID NO: 23 - protein, 1307 aa, Synthetic construct
MTQFEGFTNLYQVSKTLRFELIPQGKTLKHIQEQGFIEEDKARNDHYKELKPIIDRIYKTYADQCLQLVQLDWENLSAAIDSYRKEKTEETRNALIEEQATYRNAIHDYFIGRTDNLTDAINKRHAEIYKGLFKAELFNGKVLKQLGTVTTTEHENALLRSFDKFTTYFSGFYENRKNVFSAEDISTAIPHRIVQDNFPKFKENCHIFTRLITAVPSLREHFENVKKAIGIFVSTSIEEVFSFPFYNQLLTQTQIDLYNQLLGGISREAGTEKIKGLNEVLNLAIQKNDETAHIIASLPHRFIPLFKQILSDRNTLSFILEEFKSDEEVIQSFCKYKTLLRNENVLETAEALFNELNSIDLTHIFISHKKLETISSALCDHWDTLRNALYERRISELTGKITKSAKEKVQRSLKHEDINLQEIISAAGKELSEAFKQKTSEILSHAHAALDQPLPTTLKKQEEKEILKSQLDSLLGLYHLLDWFAVDESNEVDPEFSARLTGIKLEMEPSLSFYNKARNYATKKPYSVEKFKLNFQMPTLARGWDVNVEKNRGAILFVKNGLYYLGIMPKQKGRYKALSFEPTEKTSEGFDKMYYDYFPDAAKMIPKCSTQLKAVTAHFQTHTTPILLSNNFIEPLEITKEIYDLNNPEKEPKKFQTAYAKKTGDQKGYREALCKWIDFTRDFLSKYTKTTSIDLSSLRPSSQYKDLGEYYAELNPLLYHISFQRIAEKEIMDAVETGKLYLFQIYNKDFAKGHHGKPNLHTLYWTGLFSPENLAKTSIKLNGQAELFYRPKSRMKRMAHRLGEKMLNKKLKDQKTPIPDTLYQELYDYVNHRLSHDLSDEARALLPNVITKEVSHEIIKDRRFTSDKFFFHVPITLNYQAANSPSKFNQRVNAYLKEHPETPIIGIARGERNLIYITVIDSTGKILEQRSLNTIQQFDYQKKLDNREKERVAARQAWSVVGTIKDLKQGYLSQVIHEIVDLMIHYQAVVVLENLNFGFKSKRTGIAEKAVYQQFEKMLIDKLNCLVLKDYPAEKVGGVLNPYQLTDQFTSFAKMGTQSGFLFYVPAPYTSKIDPLTGFVDPFVWKTIKNHESRKHFLEGFDFLHYDVKTGDFILHFKMNRNLSFQRGLPGFMPAWDIVFEKNETQFDAKGTPFIAGKRIVPVIENHRFTGRYRDLYPANELIALLEEKGIVFRDGSNILPKLLENDDSHAIDTMVALIRSVLQMRNSNAATGEDYINSPVRDLNGVCFDSRFQNPEWPMDADANGAYHIALKGQLLLNHLKESKDLKLQNGISNQDWLAYIQELRN

SEQ ID NO: 24 - protein, 1307 aa, Synthetic construct
MTQFEGFTNLYQVSKTLRFELIPQGKTLKHIQEQGFIEEDKARNDHYKELKPIIDRIYKTYADQCLQLVQLDWENLSAAIDSYRKEKTEETRNALIEEQATYRNAIHDYFIGRTDNLTDAINKRHAEIYKGLFKAELFNGKVLKQLGTVTTTEHENALLRSFDKFTTYFSGFYENRKNVFSAEDISTAIPHRIVQDNFPKFKENCHIFTRLITAVPSLREHFENVKKAIGIFVSTSIEEVFSFPFYNQLLTQTQIDLYNQLLGGISREAGTEKIKGLNEVLNLAIQKNDETAHIIASLPHRFIPLFKQILSDRNTLSFILEEFKSDEEVIQSFCKYKTLLRNENVLETAEALFNELNSIDLTHIFISHKKLETISSALCDHWDTLRNALYERRISELTGKITKSAKEKVQRSLKHEDINLQEIISAAGKELSEAFKQKTSEILSHAHAALDQPLPTTLKKQEEKEILKSQLDSLLGLYHLLDWFAVDESNEVDPEFSARLTGIKLEMEPSLSFYNKARNYATKKPYSVEKFKLNFQMPTLARGWDVNKEKNNGAILFVKNGLYYLGIMPKQKGRYKALSFEPTEKTSEGFDKMYYDYFPDAAKMIPRCSTQLKAVTAHFQTHTTPILLSNNFIEPLEITKEIYDLNNPEKEPKKFQTAYAKKTGDQKGYREALCKWIDFTRDFLSKYTKTTSIDLSSLRPSSQYKDLGEYYAELNPLLYHISFQRIAEKEIMDAVETGKLYLFQIYNKDFAKGHHGKPNLHTLYWTGLFSPENLAKTSIKLNGQAELFYRPKSRMKRMAHRLGEKMLNKKLKDQKTPIPDTLYQELYDYVNHRLSHDLSDEARALLPNVITKEVSHEIIKDRRFTSDKFFFHVPITLNYQAANSPSKFNQRVNAYLKEHPETPIIGIARGERNLIYITVIDSTGKILEQRSLNTIQQFDYQKKLDNREKERVAARQAWSVVGTIKDLKQGYLSQVIHEIVDLMIHYQAVVVLENLNFGFKSKRTGIAEKAVYQQFEKMLIDKLNCLVLKDYPAEKVGGVLNPYQLTDQFTSFAKMGTQSGFLFYVPAPYTSKIDPLTGFVDPFVWKTIKNHESRKHFLEGFDFLHYDVKTGDFILHFKMNRNLSFQRGLPGFMPAWDIVFEKNETQFDAKGTPFIAGKRIVPVIENHRFTGRYRDLYPANELIALLEEKGIVFRDGSNILPKLLENDDSHAIDTMVALIRSVLQMRNSNAATGEDYINSPVRDLNGVCFDSRFQNPEWPMDADANGAYHIALKGQLLLNHLKESKDLKLQNGISNQDWLAYIQELRN

SEQ ID NO: 25 - protein, 986 aa, Synthetic construct
MEKRINKIRKKLSADNATKPVSRSGPMKTLLVRVMTDDLKKRLEKRRKKPEVMPQVISNNAANNLRMLLDDYTKMKEAILQVYWQEFKDDHVGLMCKFAQPASKKIDQNKLKPEMDEKGNLTTAGFACSQCGQPLFVYKLEQVSEKGKAYTNYFGRCNVAEHEKLILLAQLKPEKDSDEAVTYSLGKFGQRALDFYSIHVTKESTHPVKPLAQIAGNRYASGPVGKALSDACMGTIASFLSKYQDIIIEHQKVVKGNQKRLESLRELAGKENLEYPSVTLPPQPHTKEGVDAYNEVIARVRMWVNLNLWQKLKLSRDDAKPLLRLKGFPSFPVVERRENEVDWWNTINEVKKLIDAKRDMGRVFWSGVTAEKRNTILEGYNYLPNENDHKKREGSLENPKKPAKRQFGDLLLYLEKKYAGDWGKVFDEAWERIDKKIAGLTSHIEREEARNAEDAQSKAVLTDWLRAKASFVLERLKEMDEKEFYACEIQLQKWYGDLRGNPFAVEAENRVVDISGFSIGSDGHSIQYRNLLAWKYLENGKREFYLLMNYGKKGRIRFTDGTDIKKSGKWQGLLYGGGKAKVIDLTFDPDDEQLIILPLAFGTRQGREFIWNDLLSLETGLIKLANGRVIEKTIYNKKIGRDEPALFVALTFERREVVDPSNIKPVNLIGVARGENIPAVIALTDPEGCPLPEFKDSSGGPTDILRIGEGYKEKQRAIQAAKEVEQRRAGGYSRKFASKSRNLADDMVRNSARDLFYHAVTHDAVLVFANLSRGFGRQGKRTFMTERQYTKMEDWLTAKLAYEGLTSKTYLSKTLAQYTSKTCSNCGFTITTADYDGMLVRLKKTSDGWATTLNNKELKAEGQITYYNRYKRQTVEKELSAELDRLSEESGNNDISKWTKGRRDEALFLLKKRFSHRPVQEQFVCLDCGHEVHAAEQAALNIARSWLFLNSNSTEFKSYKSGKQPFVGAWQAFYKRRLKEVWKPNA

SEQ ID NO: 26 - protein, 757 aa, Synthetic construct
MPKPAVESEFSKVLKKHFPGERFRSSYMKRGGKILAAQGEEAVVAYLQGKSEEEPPNFQPPAKCHVVTKSRDFAEWPIMKASEAIQRYIYALSTTERAACKPGKSSESHAAWFAATGVSNHGYSHVQGLNLIFDHTLGRYDGVLKKVQLRNEKARARLESINASRADEGLPEIKAEEEEVATNETGHLLQPPGINPSFYVYQTISPQAYRPRDEIVLPPEYAGYVRDPNAPIPLGVVRNRCDIQKGCPGYIPEWQREAGTAISPKTGKAVTVPGLSPKKNKRMRRYWRSEKEKAQDALLVTVRIGTDWVVIDVRGLLRNARWRTIAPKDISLNALLDLFTGDPVIDVRRNIVTFTYTLDACGTYARKWTLKGKQTKATLDKLTATQTVALVAIALGQTNPISAGISRVTQENGALQCEPLDRFTLPDDLLKDISAYRIAWDRNEEELRARSVEALPEAQQAEVRALDGVSKETARTQLCADFGLDPKRLPWDKMSSNTTFISEALLSNSVSRDQVFFTPAPKKGAKKKAPVEVMRKDRTWARAYKPRLSVEAQKLKNEALWALKRTSPEYLKLSRRKEELCRRSINYVIEKTRRRTQCQIVIPVIEDLNVRFFHGSGKRLPGWDNFFTAKKENRWFIQGLHKAFSDLRTHRSFYVFEVRPERTSITCPKCGHCEVGNRDGEAFQCLSCGKTCNADLDVATHNLTQVALTGKTMPKREEPRDAQGTAPARKTKKASKSKAPPAEREDQTPAQEPSQTS

SEQ ID NO: 27 - protein, 1368 aa, Synthetic construct
MDKKYSIGLAIGTNSVGWAVITDEYKVPSKKFKVLGNTDRHSIKKNLIGALLFDSGETAEATRLKRTARRRYTRRKNRICYLQEIFSNEMAKVDDSFFHRLEESFLVEEDKKHERHPIFGNIVDEVAYHEKYPTIYHLRKKLVDSTDKADLRLIYLALAHMIKFRGHFLIEGDLNPDNSDVDKLFIQLVQTYNQLFEENPINASGVDAKAILSARLSKSRRLENLIAQLPGEKKNGLFGNLIALSLGLTPNFKSNFDLAEDAKLQLSKDTYDDDLDNLLAQIGDQYADLFLAAKNLSDAILLSDILRVNTEITKAPLSASMIKRYDEHHQDLTLLKALVRQQLPEKYKEIFFDQSKNGYAGYIDGGASQEEFYKFIKPILEKMDGTEELLVKLNREDLLRKQRTFDNGSIPHQIHLGELHAILRRQEDFYPFLKDNREKIEKILTFRIPYYVGPLARGNSRFAWMTRKSEETITPWNFEEVVDKGASAQSFIERMTNFDKNLPNEKVLPKHSLLYEYFTVYNELTKVKYVTEGMRKPAFLSGEQKKAIVDLLFKTNRKVTVKQLKEDYFKKIECFDSVEISGVEDRFNASLGTYHDLLKIIKDKDFLDNEENEDILEDIVLTLTLFEDREMIEERLKTYAHLFDDKVMKQLKRRRYTGWGRLSRKLINGIRDKQSGKTILDFLKSDGFANRNFMQLIHDDSLTFKEDIQKAQVSGQGDSLHEHIANLAGSPAIKKGILQTVKVVDELVKVMGRHKPENIVIEMARENQTTQKGQKNSRERMKRIEEGIKELGSQILKEHPVENTQLQNEKLYLYYLQNGRDMYVDQELDINRLSDYDVDAIVPQSFLKDDSIDNKVLTRSDKNRGKSDNVPSEEVVKKMKNYWRQLLNAKLITQRKFDNLTKAERGGLSELDKAGFIKRQLVETRQITKHVAQILDSRMNTKYDENDKLIREVKVITLKSKLVSDFRKDFQFYKVREINNYHHAHDAYLNAVVGTALIKKYPKLESEFVYGDYKVYDVRKMIAKSEQEIGKATAKYFFYSNIMNFFKTEITLANGEIRKRPLIETNGETGEIVWDKGRDFATVRKVLSMPQVNIVKKTEVQTGGFSKESILPKRNSDKLIARKKDWDPKKYGGFVSPTVAYSVLVVAKVEKGKSKKLKSVKELLGITIMERSSFEKNPIDFLEAKGYKEVKKDLIIKLPKYSLFELENGRKRMLASARELQKGNELALPSKYVNFLYLASHYEKLKGSPEDNEQKQLFVEQHKHYLDEIIEQISEFSKRVILADANLDKVLSAYNKHRDKPIREQAENIIHLFTLTNLGAPAAFKYFDTTIDRKEYRSTKEVLDATLIHQSITGLYETRIDLSQLGGD

SEQ ID NO: 28 - protein, 1368 aa, Synthetic construct
MDKKYSIGLAIGTNSVGWAVITDEYKVPSKKFKVLGNTDRHSIKKNLIGALLFDSGETAEATRLKRTARRRYTRRKNRICYLQEIFSNEMAKVDDSFFHRLEESFLVEEDKKHERHPIFGNIVDEVAYHEKYPTIYHLRKKLVDSTDKADLRLIYLALAHMIKFRGHFLIEGDLNPDNSDVDKLFIQLVQTYNQLFEENPINASGVDAKAILSARLSKSRRLENLIAQLPGEKKNGLFGNLIALSLGLTPNFKSNFDLAEDAKLQLSKDTYDDDLDNLLAQIGDQYADLFLAAKNLSDAILLSDILRVNTEITKAPLSASMIKRYDEHHQDLTLLKALVRQQLPEKYKEIFFDQSKNGYAGYIDGGASQEEFYKFIKPILEKMDGTEELLVKLNREDLLRKQRTFDNGSIPHQIHLGELHAILRRQEDFYPFLKDNREKIEKILTFRIPYYVGPLARGNSRFAWMTRKSEETITPWNFEEVVDKGASAQSFIERMTNFDKNLPNEKVLPKHSLLYEYFTVYNELTKVKYVTEGMRKPAFLSGEQKKAIVDLLFKTNRKVTVKQLKEDYFKKIECFDSVEISGVEDRFNASLGTYHDLLKIIKDKDFLDNEENEDILEDIVLTLTLFEDREMIEERLKTYAHLFDDKVMKQLKRRRYTGWGRLSRKLINGIRDKQSGKTILDFLKSDGFANRNFMQLIHDDSLTFKEDIQKAQVSGQGDSLHEHIANLAGSPAIKKGILQTVKVVDELVKVMGRHKPENIVIEMARENQTTQKGQKNSRERMKRIEEGIKELGSQILKEHPVENTQLQNEKLYLYYLQNGRDMYVDQELDINRLSDYDVDAIVPQSFLKDDSIDNKVLTRSDKNRGKSDNVPSEEVVKKMKNYWRQLLNAKLITQRKFDNLTKAERGGLSELDKAGFIKRQLVETRQITKHVAQILDSRMNTKYDENDKLIREVKVITLKSKLVSDFRKDFQFYKVREINNYHHAHDAYLNAVVGTALIKKYPKLESEFVYGDYKVYDVRKMIAKSEQEIGKATAKYFFYSNIMNFFKTEITLANGEIRKRPLIETNGETGEIVWDKGRDFATVRKVLSMPQVNIVKKTEVQTGGFSKESILPKRNSDKLIARKKDWDPKKYGGFESPTVAYSVLVVAKVEKGKSKKLKSVKELLGITIMERSSFEKNPIDFLEAKGYKEVKKDLIIKLPKYSLFELENGRKRMLASAGELQKGNELALPSKYVNFLYLASHYEKLKGSPEDNEQKQLFVEQHKHYLDEIIEQISEFSKRVILADANLDKVLSAYNKHRDKPIREQAENIIHLFTLTNLGAPAAFKYFDTTIDRKQYRSTKEVLDATLIHQSITGLYETRIDLSQLGGD

SEQ ID NO: 29 - protein, 1368 aa, Synthetic construct
MDKKYSIGLAIGTNSVGWAVITDEYKVPSKKFKVLGNTDRHSIKKNLIGALLFDSGETAEATRLKRTARRRYTRRKNRICYLQEIFSNEMAKVDDSFFHRLEESFLVEEDKKHERHPIFGNIVDEVAYHEKYPTIYHLRKKLVDSTDKADLRLIYLALAHMIKFRGHFLIEGDLNPDNSDVDKLFIQLVQTYNQLFEENPINASGVDAKAILSARLSKSRRLENLIAQLPGEKKNGLFGNLIALSLGLTPNFKSNFDLAEDAKLQLSKDTYDDDLDNLLAQIGDQYADLFLAAKNLSDAILLSDILRVNTEITKAPLSASMIKRYDEHHQDLTLLKALVRQQLPEKYKEIFFDQSKNGYAGYIDGGASQEEFYKFIKPILEKMDGTEELLVKLNREDLLRKQRTFDNGSIPHQIHLGELHAILRRQEDFYPFLKDNREKIEKILTFRIPYYVGPLARGNSRFAWMTRKSEETITPWNFEEVVDKGASAQSFIERMTNFDKNLPNEKVLPKHSLLYEYFTVYNELTKVKYVTEGMRKPAFLSGEQKKAIVDLLFKTNRKVTVKQLKEDYFKKIECFDSVEISGVEDRFNASLGTYHDLLKIIKDKDFLDNEENEDILEDIVLTLTLFEDREMIEERLKTYAHLFDDKVMKQLKRRRYTGWGRLSRKLINGIRDKQSGKTILDFLKSDGFANRNFMQLIHDDSLTFKEDIQKAQVSGQGDSLHEHIANLAGSPAIKKGILQTVKVVDELVKVMGRHKPENIVIEMARENQTTQKGQKNSRERMKRIEEGIKELGSQILKEHPVENTQLQNEKLYLYYLQNGRDMYVDQELDINRLSDYDVDAIVPQSFLKDDSIDNKVLTRSDKNRGKSDNVPSEEVVKKMKNYWRQLLNAKLITQRKFDNLTKAERGGLSELDKAGFIKRQLVETRQITKHVAQILDSRMNTKYDENDKLIREVKVITLKSKLVSDFRKDFQFYKVREINNYHHAHDAYLNAVVGTALIKKYPKLESEFVYGDYKVYDVRKMIAKSEQEIGKATAKYFFYSNIMNFFKTEITLANGEIRKRPLIETNGETGEIVWDKGRDFATVRKVLSMPQVNIVKKTEVQTGGFSKESILPKRNSDKLIARKKDWDPKKYGGFVSPTVAYSVLVVAKVEKGKSKKLKSVKELLGITIMERSSFEKNPIDFLEAKGYKEVKKDLIIKLPKYSLFELENGRKRMLASAGELQKGNELALPSKYVNFLYLASHYEKLKGSPEDNEQKQLFVEQHKHYLDEIIEQISEFSKRVILADANLDKVLSAYNKHRDKPIREQAENIIHLFTLTNLGAPAAFKYFDTTIDRKQYRSTKEVLDATLIHQSITGLYETRIDLSQLGGD

SEQ ID NO: 30 - protein, 1368 aa, Synthetic construct
MDKKYSIGLAIGTNSVGWAVITDEYKVPSKKFKVLGNTDRHSIKKNLIGALLFDSGETAEATRLKRTARRRYTRRKNRICYLQEIFSNEMAKVDDSFFHRLEESFLVEEDKKHERHPIFGNIVDEVAYHEKYPTIYHLRKKLVDSTDKADLRLIYLALAHMIKFRGHFLIEGDLNPDNSDVDKLFIQLVQTYNQLFEENPINASGVDAKAILSARLSKSRRLENLIAQLPGEKKNGLFGNLIALSLGLTPNFKSNFDLAEDAKLQLSKDTYDDDLDNLLAQIGDQYADLFLAAKNLSDAILLSDILRVNTEITKAPLSASMIKRYDEHHQDLTLLKALVRQQLPEKYKEIFFDQSKNGYAGYIDGGASQEEFYKFIKPILEKMDGTEELLVKLNREDLLRKQRTFDNGSIPHQIHLGELHAILRRQEDFYPFLKDNREKIEKILTFRIPYYVGPLARGNSRFAWMTRKSEETITPWNFEEVVDKGASAQSFIERMTNFDKNLPNEKVLPKHSLLYEYFTVYNELTKVKYVTEGMRKPAFLSGEQKKAIVDLLFKTNRKVTVKQLKEDYFKKIECFDSVEISGVEDRFNASLGTYHDLLKIIKDKDFLDNEENEDILEDIVLTLTLFEDREMIEERLKTYAHLFDDKVMKQLKRRRYTGWGRLSRKLINGIRDKQSGKTILDFLKSDGFANRNFMQLIHDDSLTFKEDIQKAQVSGQGDSLHEHIANLAGSPAIKKGILQTVKVVDELVKVMGRHKPENIVIEMARENQTTQKGQKNSRERMKRIEEGIKELGSQILKEHPVENTQLQNEKLYLYYLQNGRDMYVDQELDINRLSDYDVDAIVPQSFLKDDSIDNKVLTRSDKNRGKSDNVPSEEVVKKMKNYWRQLLNAKLITQRKFDNLTKAERGGLSELDKAGFIKRQLVETRQITKHVAQILDSRMNTKYDENDKLIREVKVITLKSKLVSDFRKDFQFYKVREINNYHHAHDAYLNAVVGTALIKKYPKLESEFVYGDYKVYDVRKMIAKSEQEIGKATAKYFFYSNIMNFFKTEITLANGEIRKRPLIETNGETGEIVWDKGRDFATVRKVLSMPQVNIVKKTEVQTGGFSKESILPKRNSDKLIARKKDWDPKKYGGFLWPTVAYSVLVVAKVEKGKSKKLKSVKELLGITIMERSSFEKNPIDFLEAKGYKEVKKDLIIKLPKYSLFELENGRKRMLASAKQLQKGNELALPSKYVNFLYLASHYEKLKGSPEDNEQKQLFVEQHKHYLDEIIEQISEFSKRVILADANLDKVLSAYNKHRDKPIREQAENIIHLFTLTNLGAPAAFKYFDTTIDRKQYRSTKEVLDATLIHQSITGLYETRIDLSQLGGD

SEQ ID NO: 31 - protein, 1368 aa, Synthetic construct
MDKKYSIGLAIGTNSVGWAVITDEYKVPSKKFKVLGNTDRHSIKKNLIGALLFDSGETAERTRLKRTARRRYTRRKNRICYLQEIFSNEMAKVDDSFFHRLEESFLVEEDKKHERHPIFGNIVDEVAYHEKYPTIYHLRKKLVDSTDKADLRLIYLALAHMIKFRGHFLIEGDLNPDNSDVDKLFIQLVQTYNQLFEENPINASGVDAKAILSARLSKSRRLENLIAQLPGEKKNGLFGNLIALSLGLTPNFKSNFDLAEDAKLQLSKDTYDDDLDNLLAQIGDQYADLFLAAKNLSDAILLSDILRVNTEITKAPLSASMIKRYDEHHQDLTLLKALVRQQLPEKYKEIFFDQSKNGYAGYIDGGASQEEFYKFIKPILEKMDGTEELLVKLNREDLLRKQRTFDNGSIPHQIHLGELHAILRRQEDFYPFLKDNREKIEKILTFRIPYYVGPLARGNSRFAWMTRKSEETITPWNFEEVVDKGASAQSFIERMTNFDKNLPNEKVLPKHSLLYEYFTVYNELTKVKYVTEGMRKPAFLSGEQKKAIVDLLFKTNRKVTVKQLKEDYFKKIECFDSVEISGVEDRFNASLGTYHDLLKIIKDKDFLDNEENEDILEDIVLTLTLFEDREMIEERLKTYAHLFDDKVMKQLKRRRYTGWGRLSRKLINGIRDKQSGKTILDFLKSDGFANRNFMQLIHDDSLTFKEDIQKAQVSGQGDSLHEHIANLAGSPAIKKGILQTVKVVDELVKVMGRHKPENIVIEMARENQTTQKGQKNSRERMKRIEEGIKELGSQILKEHPVENTQLQNEKLYLYYLQNGRDMYVDQELDINRLSDYDVDAIVPQSFLKDDSIDNKVLTRSDKNRGKSDNVPSEEVVKKMKNYWRQLLNAKLITQRKFDNLTKAERGGLSELDKAGFIKRQLVETRQITKHVAQILDSRMNTKYDENDKLIREVKVITLKSKLVSDFRKDFQFYKVREINNYHHAHDAYLNAVVGTALIKKYPKLESEFVYGDYKVYDVRKMIAKSEQEIGKATAKYFFYSNIMNFFKTEITLANGEIRKRPLIETNGETGEIVWDKGRDFATVRKVLSMPQVNIVKKTEVQTGGFSKESIRPKRNSDKLIARKKDWDPKKYGGFLWPTVAYSVLVVAKVEKGKSKKLKSVKELLGITIMERSSFEKNPIDFLEAKGYKEVKKDLIIKLPKYSLFELENGRKRMLASAKQLQKGNELALPSKYVNFLYLASHYEKLKGSPEDNEQKQLFVEQHKHYLDEIIEQISEFSKRVILADANLDKVLSAYNKHRDKPIREQAENIIHLFTLTRLGAPRAFKYFDTTIDPKQYRSTKEVLDATLIHQSITGLYETRIDLSQLGGD

SEQ ID NO: 32 - protein, 1053 aa, Synthetic construct
MKRNYILGLAIGITSVGYGIIDYETRDVIDAGVRLFKEANVENNEGRRSKRGARRLKRRRRHRIQRVKKLLFDYNLLTDHSELSGINPYEARVKGLSQKLSEEEFSAALLHLAKRRGVHNVNEVEEDTGNELSTKEQISRNSKALEEKYVAELQLERLKKDGEVRGSINRFKTSDYVKEAKQLLKVQKAYHQLDQSFIDTYIDLLETRRTYYEGPGEGSPFGWKDIKEWYEMLMGHCTYFPEELRSVKYAYNADLYNALNDLNNLVITRDENEKLEYYEKFQIIENVFKQKKKPTLKQIAKEILVNEEDIKGYRVTSTGKPEFTNLKVYHDIKDITARKEIIENAELLDQIAKILTIYQSSEDIQEELTNLNSELTQEEIEQISNLKGYTGTHNLSLKAINLILDELWHTNDNQIAIFNRLKLVPKKVDLSQQKEIPTTLVDDFILSPVVKRSFIQSIKVINAIIKKYGLPNDIIIELAREKNSKDAQKMINEMQKRNRQTNERIEEIIRTTGKENAKYLIEKIKLHDMQEGKCLYSLEAIPLEDLLNNPFNYEVDHIIPRSVSFDNSFNNKVLVKQEEASKKGNRTPFQYLSSSDSKISYETFKKHILNLAKGKGRISKTKKEYLLEERDINRFSVQKDFINRNLVDTRYATRGLMNLLRSYFRVNNLDVKVKSINGGFTSFLRRKWKFKKERNKGYKHHAEDALIIANADFIFKEWKKLDKAKKVMENQMFEEKQAESMPEIETEQEYKEIFITPHQIKHIKDFKDYKYSHRVDKKPNRKLINDTLYSTRKDDKGNTLIVNNLNGLYDKDNDKLKKLINKSPEKLLMYHHDPQTYQKLKLIMEQYGDEKNPLYKYYEETGNYLTKYSKKDNGPVIKKIKYYGNKLNAHLDITDDYPNSRNKVVKLSLKPYRFDVYLDNGVYKFVTVKNLDVIKKENYYEVNSKCYEEAKKLKKISNQAEFIASFYKNDLIKINGELYRVIGVNNDLLNRIEVNMIDITYREYLENMNDKRPPHIIKTIASKTQSIKKYSTDILGNLYEVKSKKHPQIIKKG

SEQ ID NO: 33 - protein, 100 aa, Synthetic construct
MNNSQGRVTFEDVTVNFTQGEWQRLNPEQRNLYRDVMLENYSNLVSVGQGETTKPDVILRLEQGKEPWLEEEEVLGSGRAEKNGDIGGQIWKPKDVKESL

SEQ ID NO: 34 - protein, 106 aa, Synthetic construct
MAATLLMAGSQAPVTFEDMAMYLTREEWRPLDAAQRDLYRDVMQENYGNVVSLDFEIRSENEVNPKQEISEDVQFGTTSERPAENAEENPESEEGFESGDRSERQW

SEQ ID NO: 35 - protein, 95 aa, Synthetic construct
MLENYRNLVFLGIAVSKPDLITCLEQGKEPCNMKRHEMVAKPPVMCSHIAEDLCPERDIKYFFQKVILRRYDKCEHENLQLRKGCKSVDECKVCK

SEQ ID NO: 36 - protein, 95 aa, Synthetic construct
MGLLTFRDVAIEFSLEEWQCLDTAQRNLYKNVILENYRNLVFLGIAVSKQDLITCLEQEKEPLTVKRHEMVNEPPVMCSHFAQEFWPEQNIKDSF

SEQ ID NO: 37 - protein, 116 aa, Synthetic construct
MLQMQNSEHHGQSIKTQTDSISLEDVAVNFTLEEWALLDPGQRNIYRDVMRATFKNLACIGEKWKDQDIEDEHKNQGRNLRSPMVEALCENKEDCPCGKSTSQIPDLNTNLETPTG

SEQ ID NO: 38 - protein, 100 aa, Synthetic construct
MALSQGLLTFRDVAIEFSQEEWKCLDPAQRTLYRDVMLENYRNLVSLDISSKCMMNTLSSTGQGNTEVIHTGTLQRQASYHIGAFCSQEIEKDIHDFVFQ

SEQ ID NO: 39 - protein, 98 aa, Synthetic construct
MAQGLVTFADVAIDFSQEEWACLNSAQRDLYWDVMLENYSNLVSLDLESAYENKSLPTKKNIHEIRASKRNSDRRSKSLGRNWICEGTLERPQRSRGR

SEQ ID NO: 40 - protein, 118 aa, Synthetic construct
MLREEATKKSKEKEPGMALPQGRLTFRDVAIEFSLEEWKCLNPAQRALYRAVMLENYRNLEFVDSSLKSMMEFSSTRHSITGEVIHTGTLQRHKSHHIGDFCFPEMKKDIHHFEFQWQ

SEQ ID NO: 41 - protein, 104 aa, Synthetic construct
MPGPPGSLEMGPLTFRDVAIEFSLEEWQCLDTAQRNLYRKVMFENYRNLVFLGIAVSKPHLITCLEQGKEPWNRKRQEMVAKPPVIYSHFTEDLWPEHSIKDSF

SEQ ID NO: 42 - protein, 113 aa, Synthetic construct
MSPPWSPALAAEGRGSSCEASVSFEDVTVDFSKEEWQHLDPAQRRLYWDVTLENYSHLLSVGYQIPKSEAAFKLEQGEGPWMLEGEAPHQSCSGEAIGKMQQQGIPGGIFFHC

SEQ ID NO: 43 - protein, 109 aa, Synthetic construct
MASPSPPPESKEEWDYLDPAQRSLYKDVMMENYGNLVSLDVLNRDKDEEPTVKQEIEEIEEEVEPQGVIVTRIKSEIDQDPMGRETFELVGRLDKQRGIFLWEIPRESL

SEQ ID NO: 44 - protein, 99 aa, Synthetic construct
MALTQGPLKFMDVAIEFSQEEWKCLDPAQRTLYRDVMLENYRNLVSLGICLPDLSVTSMLEQKRDPWTLQSEEKIANDPDGRECIKGVNTERSSKLGSN

SEQ ID NO: 45 - protein, 100 aa, Synthetic construct
MAASAQVSVTFEDVAVTFTQEEWGQLDAAQRTLYQEVMLETCGLLMSLGCPLFKPELIYQLDHRQELWMATKDLSQSSYPGDNTKPKTTEPTFSHLALPE

SEQ ID NO: 46 - protein, 144 aa, Synthetic construct
MFSQEERMAAGYLPRWSQELVTFEDVSMDFSQEEWELLEPAQKNLYREVMLENYRNVVSLEALKNQCTDVGIKEGPLSPAQTSQVTSLSSWTGYLLFQPVASSHLEQREALWIEEKGTPQASCSDWMTVLRNQDSTYKKVALQE

SEQ ID NO: 47 - protein, 97 aa, Synthetic construct
MSQGSVTFRDVAIDFSQEEWKWLQPAQRDLYRCVMLENYGHLVSLGLSISKPDVVSLLEQGKEPWLGKREVKRDLFSVSESSGEIKDFSPKNVIYDD

SEQ ID NO: 48 - protein, 112 aa, Synthetic construct
MEEAQKRKAKESGMALPQGRLTFMDVAIEFSQEEWKSLDPGQRALYRDVMLENYRNLVFLGRSCVLGSNAENKPIKNQLGLTLESHLSELQLFQAGRKIYRSNQVEKFTNHR

SEQ ID NO: 49 - protein, 105 aa, Synthetic construct
MAAAVLTDRAQVSVTFDDVAVTFTKEEWGQLDLAQRTLYQEVMLENCGLLVSLGCPVPKAELICHLEHGQEPWTRKEDLSQDTCPGDKGKPKTTEPTTCEPALSE

SEQ ID NO: 50 - protein, 99 aa, Synthetic construct
MIQAQESITLEDVAVDFTWEEWQLLGAAQKDLYRDVMLENYSNLVAVGYQASKPDALFKLEQGEQLWTIEDGIHSGACSDIWKVDHVLERLQSESLVNR

SEQ ID NO: 51 - protein, 112 aa, Synthetic construct
MEGVAGVMSVGPPAARLQEPVTFRDVAVDFTQEEWGQLDPTQRILYRDVMLETFGHLLSIGPELPKPEVISQLEQGTELWVAERGTTQGCHPAWEPRSESQASRKEEGLPEE

SEQ ID NO: 52 - protein, 97 aa, Synthetic construct
MSLGSELFRDVAIVFSQEEWQWLAPAQRDLYRDVMLETYSNLVSLGLAVSKPDVISFLEQGKEPWMVERVVSGGLCPVLESRYDTKELFPKQHVYEV

SEQ ID NO: 53 - protein, 105 aa, Synthetic construct
MAHKYVGLQYHGSVTFEDVAIAFSQQEWESLDSSQRGLYRDVMLENYRNLVSMAGHSRSKPHVIALLEQWKEPEVTVRKDGRRWCTDLQLEDDTIGCKEMPTSEN

SEQ ID NO: 54 - protein, 92 aa, Synthetic construct
MAFEDVAVYFSQEEWGLLDTAQRALYRRVMLDNFALVASLGLSTSRPRVVIQLERGEEPWVPSGTDTTLSRTTYRRRNPGSWSLTEDRDVSG

SEQ ID NO: 55 - protein, 104 aa, Synthetic construct
MLENYRNLVFVGIAASKPDLITCLEQGKEPWNVKRHEMVTEPPVVYSYFAQDLWPKQGKKNYFQKVILRTYKKCGRENLQLRKYCKSMDECKVHKECYNGLNQC

SEQ ID NO: 56 - protein, 127 aa, Synthetic construct
MHFRRPDPCREPLASPIQDSVAFEDVAVNFTQEEWALLDSSQKNLYREVMQETCRNLASVGSQWKDQNIEDHFEKPGKDIRNHIVQRLCESKEDGQYGEVVSQIPNLDLNENISTGLKPCECSICGK

SEQ ID NO: 57 - protein, 110 aa, Synthetic construct
MALSQGLFTFKDVAIEFSQEEWECLDPAQRALYRDVMLENYRNLLSLDEDNIPPEDDISVGFTSKGLSPKENNKEELYHLVILERKESHGINNFDLKEVWENMPKFDSLW

SEQ ID NO: 58 - protein, 98 aa, Synthetic construct
MTFEDIIVDFTQEEWALLDTSQRKLFQDVMLENISHLVSIGKQLCKSVVLSQLEQVEKLSTQRISLLQGREVGIKHQEIPFIHHIYQKGTSTISTMRS

SEQ ID NO: 59 - protein, 103 aa, Synthetic construct
MAVTFEDVTIIFTWEEWKFLDSSQKRLYREVMWENYTNVMSVENWNESYKSQEEKFRYLEYENFSYWQGWWNAGAQMYENQNYGETVQGTDSKDLTQQDRSQC

SEQ ID NO: 60 - protein, 99 aa, Synthetic construct
MITSQGSVSFRDVTVGFTQEEWQHLDPAQRTLYRDVMLENYSHLVSVGYCIPKPEVILKLEKGEEPWILEEKFPSQSHLELINTSRNYSIMKFNEFNKG

SEQ ID NO: 61 - protein, 114 aa, Synthetic construct
MFEDVAVYLSREEWGRLGPAQRGLYRDVMLETYGNLVSLGVGPAGPKPGVISQLERGDEPWVLDVQGTSGKEHLRVNSPALGTRTEYKELTSQETFGEEDPQGSEPVEACDHIS

SEQ ID NO: 62 - protein, 112 aa, Synthetic construct
METYGNVVSLGLPGSKPDIISQLERGEDPWVLDRKGAKKSQGLWSDYSDNLKYDHTTACTQQDSLSCPWECETKGESQNTDLSPKPLISEQTVILGKTPLGRIDQENNETKQ

SEQ ID NO: 63 - protein, 102 aa, Synthetic construct
MAEMNPAQGHVVFEDVAIYFSQEEWGHLDEAQRLLYRDVMLENLALLSSLGCCHGAEDEEAPLEPGVSVGVSQVMAPKPCLSTQNTQPCETCSSLLKDILRL

SEQ ID NO: 64 - protein, 62 aa, Synthetic construct
MLDNYRNLVFLGIAVSKPDLITCLEQGKEPCNMKRHAMVAKPPVVCSHFAQDLWPKQGLKDS

SEQ ID NO: 65 - protein, 105 aa, Synthetic construct
MAAGQREARPQVSLTFEDVAVLFTRDEWRKLAPSQRNLYRDVMLENYRNLVSLGLPFTKPKVISLLQQGEDPWEVEKDGSGVSSLGSKSSHKTTKSTQTQDSSFQ

SEQ ID NO: 66 - protein, 97 aa, Synthetic construct
MALRSVMFSDVSIDFSPEEWEYLDLEQKDLYRDVMLENYSNLVSLGCFISKPDVISSLEQGKEPWKVVRKGRRQYPDLETKYETKKLSLENDIYEIN

SEQ ID NO: 67 - protein, 98 aa, Synthetic construct
MTTFKEAMTFKDVAVVFTEEELGLLDLAQRKLYRDVMLENFRNLLSVGHQAFHRDTFHFLREEKIWMMKTAIQREGNSGDKIQTEMETVSEAGTHQEW

SEQ ID NO: 68 - protein, 103 aa, Synthetic construct
MFQVEQKSQESVSFKDVTVGFTQEEWQHLDPSQRALYRDVMLENYSNLVSVGYCVHKPEVIFRLQQGEEPWKQEEEFPSQSFPEVWTADHLKERSQENQSKHL

SEQ ID NO: 69 - protein, 98 aa, Synthetic construct
MTKSKEAVTFKDVAVVFSEEELQLLDLAQRKLYRDVMLENFRNVVSVGHQSTPDGLPQLEREEKLWMMKMATQRDNSSGAKNLKEMETLQEVGLRYLP

SEQ ID NO: 70 - protein, 112 aa, Synthetic construct
MSQKPQVLGPEKQDGSCEASVSFEDVTVDFSREEWQQLDPAQRCLYRDVMLELYSHLFAVGYHIPNPEVIFRMLKEKEPRVEEAEVSHQRCQEREFGLEIPQKEISKKASFQ

SEQ ID NO: 71 - protein, 95 aa, Synthetic construct
MELVTFRDVAIEFSPEEWKCLDPAQQNLYRDVMLENYRNLVSLGFVISNPDLVTCLEQIKEPCNLKIHETAAKPPAICSPFSQDLSPVQGIEDSF

SEQ ID NO: 72 - protein, 112 aa, Synthetic construct
MSTLLQGGHNLLSSASFQESVTFKDVIVDFTQEEWKQLDPGQRDLFRDVTLENYTHLVSIGLQVSKPDVISQLEQGTEPWIMEPSIPVGTCADWETRLENSVSAPEPDISEE

SEQ ID NO: 73 - protein, 112 aa, Synthetic construct
MDPAQVPVAADLLTDHEEGYVTFEDVAVYFSQEEWRLLDDAQRLLYRNVMLENFTLLASLGLASSKTHEITQLESWEEPFMPAWEVVTSAIPRGCWHGAEAEEAPEQIASVG

SEQ ID NO: 74 - protein, 112 aa, Synthetic construct
MKKLEAVGTGIEPKAMSQGLVTFGDVAVDFSQEEWEWLNPIQRNLYRKVMLENYRNLASLGLCVSKPDVISSLEQGKEPWTVKRKMTRAWCPDLKAVWKIKELPLKKDFCEG

SEQ ID NO: 75 - protein, 108 aa, Synthetic construct
MSLLGEHWDYDALFETQPGLVTIKNLAVDFRQQLHPAQKNFCKNGIWENNSDLGSAGHCVAKPDLVSLLEQEKEPWMVKRELTGSLFSGQRSVHETQELFPKQDSYAE

SEQ ID NO: 76 - protein, 113 aa, Synthetic construct
MLALAASQPARLEERLIRDRDLGASLLPAAPQEQWRQLDSTQKEQYWDLILETYGKMVSGAGISHPKSDLTNSIEFGEELAGIYLHVNEKIPRPTCIGDRQENDKENLNLENH

SEQ ID NO: 77 - protein, 131 aa, Synthetic construct
MEGRPGETTDTCFVSGVHGPVALGDIPFYFSREEWGTLDPAQRDLFWDIKRENSRNTTLGFGLKGQSEKSLLQEMVPVVPGQTGSDVTVSWSPEEAEAWESENRPRAALGPVVGARRGRPPTRRRQFRDLA

SEQ ID NO: 78 - protein, 116 aa, Synthetic construct
MVAVVRALQRALDGTSSQGMVTFEDTAVSLTWEEWERLDPARRDFCRESAQKDSGSTVPPSLESRVENKELIPMQQILEEAEPQGQLQEAFQGKRPLFSKCGSTHEDRVEKQSGDP

SEQ ID NO: 79 - protein, 113 aa, Synthetic construct
MNKSQGSVSFTDVTVDFTQEEWEQLDPSQRILYMDVMLENYSNLLSVEVWKADDQMERDHRNPDEQARQFLILKNQTPIEERGDLFGKALNLNTDFVSLRQVPYKYDLYEKTL

SEQ ID NO: 80 - protein, 108 aa, Synthetic construct
MAHGSVTFRDVAIDFSQEEWEFLDPAQRDLYRDVMWENYSNFISLGPSISKPDVITLLDEERKEPGMVVREGTRRYCPDLESRYRTNTLSPEKDIYEIYSFQWDIMER

SEQ ID NO: 81 - protein, 141 aa, Synthetic construct
MAAAVLRDSTSVPVTAEAKLMGFTQGCVTFEDVAIYFSQEEWGLLDEAQRLLYRDVMLENFALITALVCWHGMEDEETPEQSVSVEGVPQVRTPEASPSTQKIQSCDMCVPFLTDILHLTDLPGQELYLTGACAVFHQDQK

SEQ ID NO: 82 - protein, 133 aa, Synthetic construct
MLPPTAASQREGHTEGGELVNELLKSWLKGLVTFEDVAVEFTQEEWALLDPAQRTLYRDVMLENCRNLASLGNQVDKPRLISQLEQEDKVMTEERGILSGTCPDVENPFKAKGLTPKLHVFRKEQSRNMKMER

SEQ ID NO: 83 - protein, 107 aa, Synthetic construct
MAQESVMFSDVSVDFSQEEWECLNDDQRDLYRDVMLENYSNLVSMGHSISKPNVISYLEQGKEPWLADRELTRGQWPVLESRCETKKLFLKKEIYEIESTQWEIMEK

SEQ ID NO: 84 - protein, 114 aa, Synthetic construct
MPGAPGSLEMGPLTFRDVTIEFSLEEWQCLDTVQQNLYRDVMLENYRNLVFLGMAVFKPDLITCLKQGKEPWNMKRHEMVTKPPVMRSHFTQDLWPDQSTKDSFQEVILRTYAR

SEQ ID NO: 85 - protein, 95 aa, Synthetic construct
MAGSQFPDFKHLGTFLVFEELVTFEDVLVDFSPEELSSLSAAQRNLYREVMLENYRNLVSLGHQFSKPDIISRLEEEESYAMETDSRHTVICQGE

SEQ ID NO: 86 - protein, 78 aa, Synthetic construct
MPGPPRSLEMGLLTFRDVAIEFSLEEWQHLDIAQQNLYRNVMLENYRNLAFLGIAVSKPDLITCLEQGKEPWNMKRHE

SEQ ID NO: 87 - protein, 93 aa, Synthetic construct
MAPPLAPLPPRDPNGAGPEWREPGAVSFADVAVYFCREEWGCLRPAQRALYRDVMRETYGHLSALGIGGNKPALISWVEEEAELWGPAAQDPE

SEQ ID NO: 88 - protein, 100 aa, Synthetic construct
MGPPLAPRPAHVPGEAGPRRTRESRPGAVSFADVAVYFSPEEWECLRPAQRALYRDVMRETFGHLGALGFSVPKPAFISWVEGEVEAWSPEAQDPDGESS

SEQ ID NO: 89 - protein, 573 aa, Synthetic construct
MDAKSLTAWSRTLVTFKDVFVDFTREEWKLLDTAQQIVYRNVMLENYKNLVSLGYQLTKPDVILRLEKGEEPWLVEREIHQETHPDSETAFEIKSSVSSRSIFKDKQSCDIKMEGMARNDLWYLSLEEVWKCRDQLDKYQENPERHLRQVAFTQKKVLTQERVSESGKYGGNCLLPAQLVLREYFHKRDSHTKSLKHDLVLNGHQDSCASNSNECGQTFCQNIHLIQFARTHTGDKSYKCPDNDNSLTHGSSLGISKGIHREKPYECKECGKFFSWRSNLTRHQLIHTGEKPYECKECGKSFSRSSHLIGHQKTHTGEEPYECKECGKSFSWFSHLVTHQRTHTGDKLYTCNQCGKSFVHSSRLIRHQRTHTGEKPYECPECGKSFRQSTHLILHQRTHVRVRPYECNECGKSYSQRSHLVVHHRIHTGLKPFECKDCGKCFSRSSHLYSHQRTHTGEKPYECHDCGKSFSQSSALIVHQRIHTGEKPYECCQCGKAFIRKNDLIKHQRIHVGEETYKCNQCGIIFSQNSPFIVHQIAHTGEQFLTCNQCGTALVNTSNLIGYQTNHIRENAY

SEQ ID NO: 90 - protein, 191 aa, Synthetic construct
MGKKTKRTADSSSSEDEEEYVVEKVLDRRVVKGQVEYLLKWKGFSEEHNTWEPEKNLDCPELISEFMKKYKKMKEGENNKPREKSESNKRKSNFSNSADDIKSKKKREQSNDIARGFERGLEPEKIIGATDSCGDLMFLMKWKDTDEADLVLAKEANVKCPQIVIAFYEERLTWHAYPEDAENKEKETAKS

SEQ ID NO: 91 - protein, 228 aa, Synthetic construct
MTMGDKKSPTRPKRQAKPAADEGFWDCSVCTFRNSAEAFKCSICDVRKGTSTRKPRINSQLVAQQVAQQYATPPPPKKEKKEKVEKQDKEKPEKDKEISPSVTKKNTNKKTKPKSDILKDPPSEANSIQSANATTKTSETNHTSRPRLKNVDRSTAQQLAVTVGNVTVIITDFKEKTRSSSTSSSTVTSSAGSEQQNQSSSGSESTDKGSSRSSTPKGDMSAVNDESF

SEQ ID NO: 92 - protein, 180 aa, Synthetic construct
MGDKKSPTRPKRQPKPSSDEGYWDCSVCTFRNSAEAFKCMMCDVRKGTSTRKPRPVSQLVAQQVTQQFVPPTQSKKEKKDKVEKEKSEKETTSKKNSHKKTRPRLKNVDRSSAQHLEVTVGDLTVIITDFKEKTKSPPASSAASADQHSQSGSSSDNTERGMSRSSSPRGEASSLNGESH

SEQ ID NO: 93 - protein, 3065 aa, Synthetic construct
MEEKQQIILANQDGGTVAGAAPTFFVILKQPGNGKTDQGILVTNQDACALASSVSSPVKSKGKICLPADCTVGGITVTLDNNSMWNEFYHRSTEMILTKQGRRMFPYCRYWITGLDSNLKYILVMDISPVDNHRYKWNGRWWEPSGKAEPHVLGRVFIHPESPSTGHYWMHQPVSFYKLKLTNNTLDQEGHIILHSMHRYLPRLHLVPAEKAVEVIQLNGPGVHTFTFPQTEFFAVTAYQNIQITQLKIDYNPFAKGFRDDGLNNKPQRDGKQKNSSDQEGNNISSSSGHRVRLTEGQGSEIQPGDLDPLSRGHETSGKGLEKTSLNIKRDFLGFMDTDSALSEVPQLKQEISECLIASSFEDDSRVASPLDQNGSFNVVIKEEPLDDYDYELGECPEGVTVKQEETDEETDVYSNSDDDPILEKQLKRHNKVDNPEADHLSSKWLPSSPSGVAKAKMFKLDTGKMPVVYLEPCAVTRSTVKISELPDNMLSTSRKDKSSMLAELEYLPTYIENSNETAFCLGKESENGLRKHSPDLRVVQKYPLLKEPQWKYPDISDSISTERILDDSKDSVGDSLSGKEDLGRKRTTMLKIATAAKVVNANQNASPNVPGKRGRPRKLKLCKAGRPPKNTGKSLISTKNTPVSPGSTFPDVKPDLEDVDGVLFVSFESKEALDIHAVDGTTEESSSLQASTTNDSGYRARISQLEKELIEDLKTLRHKQVIHPGLQEVGLKLNSVDPTMSIDLKYLGVQLPLAPATSFPFWNLTGTNPASPDAGFPFVSRTGKTNDFTKIKGWRGKFHSASASRNEGGNSESSLKNRSAFCSDKLDEYLENEGKLMETSMGFSSNAPTSPVVYQLPTKSTSYVRTLDSVLKKQSTISPSTSYSLKPHSVPPVSRKAKSQNRQATFSGRTKSSYKSILPYPVSPKQKYSHVILGDKVTKNSSGIISENQANNFVVPTLDENIFPKQISLRQAQQQQQQQQGSRPPGLSKSQVKLMDLEDCALWEGKPRTYITEERADVSLTTLLTAQASLKTKPIHTIIRKRAPPCNNDFCRLGCVCSSLALEKRQPAHCRRPDCMFGCTCLKRKVVLVKGGSKTKHFQRKAAHRDPVFYDTLGEEAREEEEGIREEEEQLKEKKKRKKLEYTICETEPEQPVRHYPLWVKVEGEVDPEPVYIPTPSVIEPMKPLLLPQPEVLSPTVKGKLLTGIKSPRSYTPKPNPVIREEDKDPVYLYFESMMTCARVRVYERKKEDQRQPSSSSSPSPSFQQQTSCHSSPENHNNAKEPDSEQQPLKQLTCDLEDDSDKLQEKSWKSSCNEGESSSTSYMHQRSPGGPTKLIEIISDCNWEEDRNKILSILSQHINSNMPQSLKVGSFIIELASQRKSRGEKNPPVYSSRVKISMPSCQDQDDMAEKSGSETPDGPLSPGKMEDISPVQTDALDSVRERLHGGKGLPFYAGLSPAGKLVAYKRKPSSSTSGLIQVASNAKVAASRKPRTLLPSTSNSKMASSSGTATNRPGKNLKAFVPAKRPIAARPSPGGVFTQFVMSKVGALQQKIPGVSTPQTLAGTQKFSIRPSPVMVVTPVVSSEPVQVCSPVTAAVTTTTPQVFLENTTAVTPMTAISDVETKETTYSSGATTTGVVEVSETNTSTSVTSTQSTATVNLTKTTGITTPVASVAFPKSLVASPSTITLPVASTASTSLVVVTAAASSSMVTTPTSSLGSVPIILSGINGSPPVSQRPENAAQIPVATPQVSPNTVKRAGPRLLLIPVQQGSPTLRPVSNTQLQGHRMVLQPVRSPSGMNLFRHPNGQIVQLLPLHQLRGSNTQPNLQPVMFRNPGSVMGIRLPAPSKPSETPPSSTSSSAFSVMNPVIQAVGSSSAVNVITQAPSLLSSGASFVSQAGTLTLRISPPEPQSFASKTGSETKITYSSGGQPVGTASLIPLQSGSFALLQLPGQKPVPSSILQHVASLQMKRESQNPDQKDETNSIKREQETKKVLQSEGEAVDPEANVIKQNSGAATSEETLNDSLEDRGDHLDEECLPEEGCATVKPSEHSCITGSHTDQDYKDVNEEYGARNRKSSKEKVAVLEVRTISEKASNKTVQNLSKVQHQKLGDVKVEQQKGFDNPEENSSEFPVTFKEESKFELSGSKVMEQQSNLQPEAKEKECGDSLEKDRERWRKHLKGPLTRKCVGASQECKKEADEQLIKETKTCQENSDVFQQEQGISDLLGKSGITEDARVLKTECDSWSRISNPSAFSIVPRRAAKSSRGNGHFQGHLLLPGEQIQPKQEKKGGRSSADFTVLDLEEDDEDDNEKTDDSIDEIVDVVSDYQSEEVDDVEKNNCVEYIEDDEEHVDIETVEELSEEINVAHLKTTAAHTQSFKQPSCTHISADEKAAERSRKAPPIPLKLKPDYWSDKLQKEAEAFAYYRRTHTANERRRRGEMRDLFEKLKITLGLLHSSKVSKSLILTRAFSEIQGLTDQADKLIGQKNLLTRKRNILIRKVSSLSGKTEEVVLKKLEYIYAKQQALEAQKRKKKMGSDEFDISPRISKQQEGSSASSVDLGQMFINNRRGKPLILSRKKDQATENTSPLNTPHTSANLVMTPQGQLLTLKGPLFSGPVVAVSPDLLESDLKPQVAGSAVALPENDDLFMMPRIVNVTSLATEGGLVDMGGSKYPHEVPDSKPSDHLKDTVRNEDNSLEDKGRISSRGNRDGRVTLGPTQVFLANKDSGYPQIVDVSNMQKAQEFLPKKISGDMRGIQYKWKESESRGERVKSKDSSFHKLKMKDLKDSSIEMELRKVTSAIEEAALDSSELLTNMEDEDDTDETLTSLLNEIAFLNQQLNDDSVGLAELPSSMDTEFPGDARRAFISKVPPGSRATFQVEHLGTGLKELPDVQGESDSISPLLLHLEDDDFSENEKQLAEPASEPDVLKIVIDSEIKDSLLSNKKAIDGGKNTSGLPAEPESVSSPPTLHMKTGLENSNSTDTLWRPMPKLAPLGLKVANPSSDADGQSLKVMPCLAPIAAKVGSVGHKMNLTGNDQEGRESKVMPTLAPVVAKLGNSGASPSSAGK

SEQ ID NO: 94 - protein, 185 aa, Synthetic construct
MGKKQNKKKVEEVLEEEEEEYVVEKVLDRRVVKGKVEYLLKWKGFSDEDNTWEPEENLDCPDLIAEFLQSQKTAHETDKSEGGKRKADSDSEDKGEESKPKKKKEESEKPRGFARGLEPERIIGATDSSGELMFLMKWKNSDEADLVPAKEANVKCPQVVISFYEERLTWHSYPSEDDDKKDDKN

SEQ ID NO: 95 - protein, 660 aa, Synthetic construct
MLVCYSVLACEILWDLPCSIMGSPLGHFTWDKYLKETCSVPAPVHCFKQSYTPPSNEFKISMKLEAQDPRNTTSTCIATVVGLTGARLRLRLDGSDNKNDFWRLVDSAEIQPIGNCEKNGGMLQPPLGFRLNASSWPMFLLKTLNGAEMAPIRIFHKEPPSPSHNFFKMGMKLEAVDRKNPHFICPATIGEVRGSEVLVTFDGWRGAFDYWCRFDSRDIFPVGWCSLTGDNLQPPGTKVVIPKNPYPASDVNTEKPSIHSSTKTVLEHQPGQRGRKPGKKRGRTPKTLISHPISAPSKTAEPLKFPKKRGPKPGSKRKPRTLLNPPPASPTTSTPEPDTSTVPQDAATIPSSAMQAPTVCIYLNKNGSTGPHLDKKKVQQLPDHFGPARASVVLQQAVQACIDCAYHQKTVFSFLKQGHGGEVISAVFDREQHTLNLPAVNSITYVLRFLEKLCHNLRSDNLFGNQPFTQTHLSLTAIEYSHSHDRYLPGETFVLGNSLARSLEPHSDSMDSASNPTNLVSTSQRHRPLLSSCGLPPSTASAVRRLCSRGVLKGSNERRDMESFWKLNRSPGSDRYLESRDASRLSGRDPSSWTVEDVMQFVREADPQLGPHADLFRKHEIDGKALLLLRSDMMMKYMGLKLGPALKLSYHIDRLKQGKF

SEQ ID NO: 96 - protein, 860 aa, Synthetic construct
MEQVAEGARVTAVPVSAADSTEELAEVEEGVGVVGEDNDAAARGAEAFGDSEEDGEDVFEVEKILDMKTEGGKVLYKVRWKGYTSDDDTWEPEIHLEDCKEVLLEFRKKIAENKAKAVRKDIQRLSLNNDIFEANSDSDQQSETKEDTSPKKKKKKLRQREEKSPDDLKKKKAKAGKLKDKSKPDLESSLESLVFDLRTKKRISEAKEELKESKKPKKDEVKETKELKKVKKGEIRDLKTKTREDPKENRKTKKEKFVESQVESESSVLNDSPFPEDDSEGLHSDSREEKQNTKSARERAGQDMGLEHGFEKPLDSAMSAEEDTDVRGRRKKKTPRKAEDTRENRKLENKNAFLEKKTVPKKQRNQDRSKSAAELEKLMPVSAQTPKGRRLSGEERGLWSTDSAEEDKETKRNESKEKYQKRHDSDKEEKGRKEPKGLKTLKEIRNAFDLFKLTPEEKNDVSENNRKREEIPLDFKTIDDHKTKENKQSLKERRNTRDETDTWAYIAAEGDQEVLDSVCQADENSDGRQQILSLGMDLQLEWMKLEDFQKHLDGKDENFAATDAIPSNVLRDAVKNGDYITVKVALNSNEEYNLDQEDSSGMTLVMLAAAGGQDDLLRLLITKGAKVNGRQKNGTTALIHAAEKNFLTTVAILLEAGAFVNVQQSNGETALMKACKRGNSDIVRLVIECGADCNILSKHQNSALHFAKQSNNVLVYDLLKNHLETLSRVAEETIKDYFEARLALLEPVFPIACHRLCEGPDFSTDFNYKPPQNIPEGSGILLFIFHANFLGKEVIARLCGPCSVQAVVLNDKFQLPVFLDSHFVYSFSPVAGPNKLFIRLTEAPSAKVKLLIGAYRVQLQ

SEQ ID NO: 97 - protein, 103 aa, Synthetic construct
MSEEKPKEGVKTENDHINLKVAGQDGSVVQFKIKRHTPLSKLMKAYCERQGLSMRQIRFRFDGQPINETDTPAQLEMEDEDTIDVFQQQTGGVPESSLAGHSF

SEQ ID NO: 98 - protein, 4834 aa, Synthetic construct
MPSESFCLAAQARLDSKWLKTDIQLAFTRDGLCGLWNEMVKDGEIVYTGTESTQNGELPPRKDDSVEPSGTKKEDLNDKEKKDEEETPAPIYRAKSILDSWVWGKQPDVNELKECLSVLVKEQQALAVQSATTTLSALRLKQRLVILERYFIALNRTVFQENVKVKWKSSGISLPPVDKKSSRPAGKGVEGLARVGSRAALSFAFAFLRRAWRSGEDADLCSELLQESLDALRALPEASLFDESTVSSVWLEVVERATRFLRSVVTGDVHGTPATKGPGSIPLQDQHLALAILLELAVQRGTLSQMLSAILLLLQLWDSGAQETDNERSAQGTSAPLLPLLQRFQSIICRKDAPHSEGDMHLLSGPLSPNESFLRYLTLPQDNELAIDLRQTAVVVMAHLDRLATPCMPPLCSSPTSHKGSLQEVIGWGLIGWKYYANVIGPIQCEGLANLGVTQIACAEKRFLILSRNGRVYTQAYNSDTLAPQLVQGLASRNIVKIAAHSDGHHYLALAATGEVYSWGCGDGGRLGHGDTVPLEEPKVISAFSGKQAGKHVVHIACGSTYSAAITAEGELYTWGRGNYGRLGHGSSEDEAIPMLVAGLKGLKVIDVACGSGDAQTLAVTENGQVWSWGDGDYGKLGRGGSDGCKTPKLIEKLQDLDVVKVRCGSQFSIALTKDGQVYSWGKGDNQRLGHGTEEHVRYPKLLEGLQGKKVIDVAAGSTHCLALTEDSEVHSWGSNDQCQHFDTLRVTKPEPAALPGLDTKHIVGIACGPAQSFAWSSCSEWSIGLRVPFVVDICSMTFEQLDLLLRQVSEGMDGSADWPPPQEKECVAVATLNLLRLQLHAAISHQVDPEFLGLGLGSILLNSLKQTVVTLASSAGVLSTVQSAAQAVLQSGWSVLLPTAEERARALSALLPCAVSGNEVNISPGRRFMIDLLVGSLMADGGLESALHAAITAEIQDIEAKKEAQKEKEIDEQEANASTFHRSRTPLDKDLINTGICESSGKQCLPLVQLIQQLLRNIASQTVARLKDVARRISSCLDFEQHSRERSASLDLLLRFQRLLISKLYPGESIGQTSDISSPELMGVGSLLKKYTALLCTHIGDILPVAASIASTSWRHFAEVAYIVEGDFTGVLLPELVVSIVLLLSKNAGLMQEAGAVPLLGGLLEHLDRFNHLAPGKERDDHEELAWPGIMESFFTGQNCRNNEEVTLIRKADLENHNKDGGFWTVIDGKVYDIKDFQTQSLTGNSILAQFAGEDPVVALEAALQFEDTRESMHAFCVGQYLEPDQEIVTIPDLGSLSSPLIDTERNLGLLLGLHASYLAMSTPLSPVEIECAKWLQSSIFSGGLQTSQIHYSYNEEKDEDHCSSPGGTPASKSRLCSHRRALGDHSQAFLQAIADNNIQDHNVKDFLCQIERYCRQCHLTTPIMFPPEHPVEEVGRLLLCCLLKHEDLGHVALSLVHAGALGIEQVKHRTLPKSVVDVCRVVYQAKCSLIKTHQEQGRSYKEVCAPVIERLRFLFNELRPAVCNDLSIMSKFKLLSSLPRWRRIAQKIIRERRKKRVPKKPESTDDEEKIGNEESDLEEACILPHSPINVDKRPIAIKSPKDKWQPLLSTVTGVHKYKWLKQNVQGLYPQSPLLSTIAEFALKEEPVDVEKMRKCLLKQLERAEVRLEGIDTILKLASKNFLLPSVQYAMFCGWQRLIPEGIDIGEPLTDCLKDVDLIPPFNRMLLEVTFGKLYAWAVQNIRNVLMDASAKFKELGIQPVPLQTITNENPSGPSLGTIPQARFLLVMLSMLTLQHGANNLDLLLNSGMLALTQTALRLIGPSCDNVEEDMNASAQGASATVLEETRKETAPVQLPVSGPELAAMMKIGTRVMRGVDWKWGDQDGPPPGLGRVIGELGEDGWIRVQWDTGSTNSYRMGKEGKYDLKLAELPAAAQPSAEDSDTEDDSEAEQTERNIHPTAMMFTSTINLLQTLCLSAGVHAEIMQSEATKTLCGLLRMLVESGTTDKTSSPNRLVYREQHRSWCTLGFVRSIALTPQVCGALSSPQWITLLMKVVEGHAPFTATSLQRQILAVHLLQAVLPSWDKTERARDMKCLVEKLFDFLGSLLTTCSSDVPLLRESTLRRRRVRPQASLTATHSSTLAEEVVALLRTLHSLTQWNGLINKYINSQLRSITHSFVGRPSEGAQLEDYFPDSENPEVGGLMAVLAVIGGIDGRLRLGGQVMHDEFGEGTVTRITPKGKITVQFSDMRTCRVCPLNQLKPLPAVAFNVNNLPFTEPMLSVWAQLVNLAGSKLEKHKIKKSTKQAFAGQVDLDLLRCQQLKLYILKAGRALLSHQDKLRQILSQPAVQETGTVHTDDGAVVSPDLGDMSPEGPQPPMILLQQLLASATQPSPVKAIFDKQELEAAALAVCQCLAVESTHPSSPGFEDCSSSEATTPVAVQHIRPARVKRRKQSPVPALPIVVQLMEMGFSRRNIEFALKSLTGASGNASSLPGVEALVGWLLDHSDIQVTELSDADTVSDEYSDEEVVEDVDDAAYSMSTGAVVTESQTYKKRADFLSNDDYAVYVRENIQVGMMVRCCRAYEEVCEGDVGKVIKLDRDGLHDLNVQCDWQQKGGTYWVRYIHVELIGYPPPSSSSHIKIGDKVRVKASVTTPKYKWGSVTHQSVGVVKAFSANGKDIIVDFPQQSHWTGLLSEMELVPSIHPGVTCDGCQMFPINGSRFKCRNCDDFDFCETCFKTKKHNTRHTFGRINEPGQSAVFCGRSGKQLKRCHSSQPGMLLDSWSRMVKSLNVSSSVNQASRLIDGSEPCWQSSGSQGKHWIRLEIFPDVLVHRLKMIVDPADSSYMPSLVVVSGGNSLNNLIELKTININPSDTTVPLLNDCTEYHRYIEIAIKQCRSSGIDCKIHGLILLGRIRAEEEDLAAVPFLASDNEEEEDEKGNSGSLIRKKAAGLESAATIRTKVFVWGLNDKDQLGGLKGSKIKVPSFSETLSALNVVQVAGGSKSLFAVTVEGKVYACGEATNGRLGLGISSGTVPIPRQITALSSYVVKKVAVHSGGRHATALTVDGKVFSWGEGDDGKLGHFSRMNCDKPRLIEALKTKRIRDIACGSSHSAALTSSGELYTWGLGEYGRLGHGDNTTQLKPKMVKVLLGHRVIQVACGSRDAQTLALTDEGLVFSWGDGDFGKLGRGGSEGCNIPQNIERLNGQGVCQIECGAQFSLALTKSGVVWTWGKGDYFRLGHGSDVHVRKPQVVEGLRGKKIVHVAVGALHCLAVTDSGQVYAWGDNDHGQQGNGTTTVNRKPTLVQGLEGQKITRVACGSSHSVAWTTVDVATPSVHEPVLFQTARDPLGASYLGVPSDADSSAASNKISGASNSKPNRPSLAKILLSLDGNLAKQQALSHILTALQIMYARDAVVGALMPAAMIAPVECPSFSSAAPSDASAMASPMNGEECMLAVDIEDRLSPNPWQEKREIVSSEDAVTPSAVTPSAPSASARPFIPVTDDLGAASIIAETMTKTKEDVESQNKAAGPEPQALDEFTSLLIADDTRVVVDLLKLSVCSRAGDRGRDVLSAVLSGMGTAYPQVADMLLELCVTELEDVATDSQSGRLSSQPVVVESSHPYTDDTSTSGTVKIPGAEGLRVEFDRQCSTERRHDPLTVMDGVNRIVSVRSGREWSDWSSELRIPGDELKWKFISDGSVNGWGWRFTVYPIMPAAGPKELLSDRCVLSCPSMDLVTCLLDFRLNLASNRSIVPRLAASLAACAQLSALAASHRMWALQRLRKLLTTEFGQSININRLLGENDGETRALSFTGSALAALVKGLPEALQRQFEYEDPIVRGGKQLLHSPFFKVLVALACDLELDTLPCCAETHKWAWFRRYCMASRVAVALDKRTPLPRLFLDEVAKKIRELMADSENMDVLHESHDIFKREQDEQLVQWMNRRPDDWTLSAGGSGTIYGWGHNHRGQLGGIEGAKVKVPTPCEALATLRPVQLIGGEQTLFAVTADGKLYATGYGAGGRLGIGGTESVSTPTLLESIQHVFIKKVAVNSGGKHCLALSSEGEVYSWGEAEDGKLGHGNRSPCDRPRVIESLRGIEVVDVAAGGAHSACVTAAGDLYTWGKGRYGRLGHSDSEDQLKPKLVEALQGHRVVDIACGSGDAQTLCLTDDDTVWSWGDGDYGKLGRGGSDGCKVPMKIDSLTGLGVVKVECGSQFSVALTKSGAVYTWGKGDYHRLGHGSDDHVRRPRQVQGLQGKKVIAIATGSLHCVCCTEDGEVYTWGDNDEGQLGDGTTNAIQRPRLVAALQGKKVNRVACGSAHTLAWSTSKPASAGKLPAQVPMEYNHLQEIPIIALRNRLLLLHHLSELFCPCIPMFDLEGSLDETGLGPSVGFDTLRGILISQGKEAAFRKVVQATMVRDRQHGPVVELNRIQVKRSRSKGGLAGPDGTKSVFGQMCAKMSSFGPDSLLLPHRVWKVKFVGESVDDCGGGYSESIAEICEELQNGLTPLLIVTPNGRDESGANRDCYLLSPAARAPVHSSMFRFLGVLLGIAIRTGSPLSLNLAEPVWKQLAGMSLTIADLSEVDKDFIPGLMYIRDNEATSEEFEAMSLPFTVPSASGQDIQLSSKHTHITLDNRAEYVRLAINYRLHEFDEQVAAVREGMARVVPVPLLSLFTGYELETMVCGSPDIPLHLLKSVATYKGIEPSASLIQWFWEVMESFSNTERSLFLRFVWGRTRLPRTIADFRGRDFVIQVLDKYNPPDHFLPESYTCFFLLKLPRYSCKQVLEEKLKYAIHFCKSIDTDDYARIALTGEPAADDSSDDSDNEDVDSFASDSTQDYLTGH

SEQ ID NO: 99 - protein, 593 aa, Synthetic construct
MAEMGSKGVTAGKIASNVQKKLTRAQEKVLQKLGKADETKDEQFEQCVQNFNKQLTEGTRLQKDLRTYLASVKAMHEASKKLNECLQEVYEPDWPGRDEANKIAENNDLLWMDYHQKLVDQALLTMDTYLGQFPDIKSRIAKRGRKLVDYDSARHHYESLQTAKKKDEAKIAKPVSLLEKAAPQWCQGKLQAHLVAQTNLLRNQAEEELIKAQKVFEEMNVDLQEELPSLWNSRVGFYVNTFQSIAGLEENFHKEMSKLNQNLNDVLVGLEKQHGSNTFTVKAQPSDNAPAKGNKSPSPPDGSPAATPEIRVNHEPEPAGGATPGATLPKSPSQLRKGPPVPPPPKHTPSKEVKQEQILSLFEDTFVPEISVTTPSQFEAPGPFSEQASLLDLDFDPLPPVTSPVKAPTPSGQSIPWDLWEPTESPAGSLPSGEPSAAEGTFAVSWPSQTAEPGPAQPAEASEVAGGTQPAAGAQEPGETAASEAASSSLPAVVVETFPATVNGTVEGGSGAGRLDLPPGFMFKVQAQHDYTATDTDELQLKAGDVVLVIPFQNPEEQDEGWLMGVKESDWNQHKELEKCRGVFPENFTERVP

SEQ ID NO: 100 - protein, 344 aa, Synthetic construct
MHRTTRIKITELNPHLMCALCGGYFIDATTIVECLHSFCKTCIVRYLETNKYCPMCDVQVHKTRPLLSIRSDKTLQDIVYKLVPGLFKDEMKRRRDFYAAYPLTEVPNGSNEDRGEVLEQEKGALSDDEIVSLSIEFYEGARDRDEKKGPLENGDGDKEKTGVRFLRCPAAMTVMHLAKFLRNKMDVPSKYKVEVLYEDEPLKEYYTLMDIAYIYPWRRNGPLPLKYRVQPACKRLTLATVPTPSEGTNTSGASECESVSDKAPSPATLPATSSSLPSPATPSHGSPSSHGPPATHPTSPTPPSTASGATTAANGGSLNCLQTPSSTSRGRKMTVNGAPVPPLT

SEQ ID NO: 101 - protein, 526 aa, Synthetic construct
MDVRFYPPPAQPAAAPDAPCLGPSPCLDPYYCNKFDGENMYMSMTEPSQDYVPASQSYPGPSLESEDFNIPPITPPSLPDHSLVHLNEVESGYHSLCHPMNHNGLLPFHPQNMDLPEITVSNMLGQDGTLLSNSISVMPDIRNPEGTQYSSHPQMAAMRPRGQPADIRQQPGMMPHGQLTTINQSQLSAQLGLNMGGSNVPHNSPSPPGSKSATPSPSSSVHEDEGDDTSKINGGEKRPASDMGKKPKTPKKKKKKDPNEPQKPVSAYALFFRDTQAAIKGQNPNATFGEVSKIVASMWDGLGEEQKQVYKKKTEAAKKEYLKQLAAYRASLVSKSYSEPVDVKTSQPPQLINSKPSVFHGPSQAHSALYLSSHYHQQPGMNPHLTAMHPSLPRNIAPKPNNQMPVTVSIANMAVSPPPPLQISPPLHQHLNMQQHQPLTMQQPLGNQLPMQVQSALHSPTMQQGFTLQPDYQTIINPTSTAAQVVTQAMEYVRSGCRNPPPQPVDWNNDYCSSGGMQRDKALYLT

SEQ ID NO: 102 - protein, 472 aa, Synthetic construct
MLGTVKMEGHETSDWNSYYADTQEAYSSVPVSNMNSGLGSMNSMNTYMTMNTMTTSGNMTPASFNMSYANPGLGAGLSPGAVAGMPGGSAGAMNSMTAAGVTAMGTALSPSGMGAMGAQQAASMNGLGPYAAAMNPCMSPMAYAPSNLGRSRAGGGGDAKTFKRSYPHAKPPYSYISLITMAIQQAPSKMLTLSEIYQWIMDLFPYYRQNQQRWQNSIRHSLSFNDCFVKVARSPDKPGKGSYWTLHPDSGNMFENGCYLRRQKRFKCEKQPGAGGGGGSGSGGSGAKGGPESRKDPSGASNPSADSPLHRGVHGKTGQLEGAPAPGPAASPQTLDHSGATATGGASELKTPASSTAPPISSGPGALASVPASHPAHGLAPHESQLHLKGDPHYSFNHPFSINNLMSSSEQQHKLDFKAYEQALQYSPYGSTLPASLPLGSASVTTRSPIEPSALEPAYYQGVYSRPVLNTS

SEQ ID NO: 103 - protein, 457 aa, Synthetic construct
MLGAVKMEGHEPSDWSSYYAEPEGYSSVSNMNAGLGMNGMNTYMSMSAAAMGSGSGNMSAGSMNMSSYVGAGMSPSLAGMSPGAGAMAGMGGSAGAAGVAGMGPHLSPSLSPLGGQAAGAMGGLAPYANMNSMSPMYGQAGLSRARDPKTYRRSYTHAKPPYSYISLITMAIQQSPNKMLTLSEIYQWIMDLFPFYRQNQQRWQNSIRHSLSFNDCFLKVPRSPDKPGKGSFWTLHPDSGNMFENGCYLRRQKRFKCEKQLALKEAAGAAGSGKKAAAGAQASQAQLGEAAGPASETPAGTESPHSSASPCQEHKRGGLGELKGTPAAALSPPEPAPSPGQQQQAAAHLLGPPHHPGLPPEAHLKPEHHYAFNHPFSINNLMSSEQQHHHSHHHHQPHKMDLKAYEQVMHYPGYGSPMPGSLAMGPVTNKTGLDASPLAADTSYYQGVYSRPIMNSS

SEQ ID NO: 104 - protein, 584 aa, Synthetic construct
MASVQASRRQWCYLCDLPKMPWAMVWDFSEAVCRGCVNFEGADRIELLIDAARQLKRSHVLPEGRSPGPPALKHPATKDLAAAAAQGPQLPPPQAQPQPSGTGGGVSGQDRYDRATSSGRLPLPSPALEYTLGSRLANGLGREEAVAEGARRALLGSMPGLMPPGLLAAAVSGLGSRGLTLAPGLSPARPLFGSDFEKEKQQRNADCLAELNEAMRGRAEEWHGRPKAVREQLLALSACAPFNVRFKKDHGLVGRVFAFDATARPPGYEFELKLFTEYPCGSGNVYAGVLAVARQMFHDALREPGKALASSGFKYLEYERRHGSGEWRQLGELLTDGVRSFREPAPAEALPQQYPEPAPAALCGPPPRAPSRNLAPTPRRRKASPEPEGEAAGKMTTEEQQQRHWVAPGGPYSAETPGVPSPIAALKNVAEALGHSPKDPGGGGGPVRAGGASPAASSTAQPPTQHRLVARNGEAEVSPTAGAEAVSGGGSGTGATPGAPLCCTLCRERLEDTHFVQCPSVPGHKFCFPCSREFIKAQGPAGEVYCPSGDKCPLVGSSVPWAFMQGEIATILAGDIKVKKERDP

SEQ ID NO: 105 - protein, 587 aa, Synthetic construct
MAAAVAVAAASRRQSCYLCDLPRMPWAMIWDFTEPVCRGCVNYEGADRVEFVIETARQLKRAHGCFPEGRSPPGAAASAAAKPPPLSAKDILLQQQQQLGHGGPEAAPRAPQALERYPLAAAAERPPRLGSDFGSSRPAASLAQPPTPQPPPVNGILVPNGFSKLEEPPELNRQSPNPRRGHAVPPTLVPLMNGSATPLPTALGLGGRAAASLAAVSGTAAASLGSAQPTDLGAHKRPASVSSSAAVEHEQREAAAKEKQPPPPAHRGPADSLSTAAGAAELSAEGAGKSRGSGEQDWVNRPKTVRDTLLALHQHGHSGPFESKFKKEPALTAGRLLGFEANGANGSKAVARTARKRKPSPEPEGEVGPPKINGEAQPWLSTSTEGLKIPMTPTSSFVSPPPPTASPHSNRTTPPEAAQNGQSPMAALILVADNAGGSHASKDANQVHSTTRRNSNSPPSPSSMNQRRLGPREVGGQGAGNTGGLEPVHPASLPDSSLATSAPLCCTLCHERLEDTHFVQCPSVPSHKFCFPCSRQSIKQQGASGEVYCPSGEKCPLVGSNVPWAFMQGEIATILAGDVKVKKERDS

SEQ ID NO: 106 - protein, 796 aa, Synthetic construct
MSAAQVSSSRRQSCYLCDLPRMPWAMIWDFSEPVCRGCVNYEGADRIEFVIETARQLKRAHGCFQDGRSPGPPPPVGVKTVALSAKEAAAAAAAAAAAAAAAQQQQQQQQQQQQQQQQQQQQQQQQQLNHVDGSSKPAVLAAPSGLERYGLSAAAAAAAAAAAAVEQRSRFEYPPPPVSLGSSSHTARLPNGLGGPNGFPKPTPEEGPPELNRQSPNSSSAAASVASRRGTHGGLVTGLPNPGGGGGPQLTVPPNLLPQTLLNGPASAAVLPPPPPHALGSRGPPTPAPPGAPGGPACLGGTPGVSATSSSASSSTSSSVAEVGVGAGGKRPGSVSSTDQERELKEKQRNAEALAELSESLRNRAEEWASKPKMVRDTLLTLAGCTPYEVRFKKDHSLLGRVFAFDAVSKPGMDYELKLFIEYPTGSGNVYSSASGVAKQMYQDCMKDFGRGLSSGFKYLEYEKKHGSGDWRLLGDLLPEAVRFFKEGVPGADMLPQPYLDASCPMLPTALVSLSRAPSAPPGTGALPPAAPSGRGAAASLRKRKASPEPPDSAEGALKLGEEQQRQQWMANQSEALKLTMSAGGFAAPGHAAGGPPPPPPPLGPHSNRTTPPESAPQNGPSPMAALMSVADTLGTAHSPKDGSSVHSTTASARRNSSSPVSPASVPGQRRLASRNGDLNLQVAPPPPSAHPGMDQVHPQNIPDSPMANSGPLCCTICHERLEDTHFVQCPSVPSHKFCFPCSRESIKAQGATGEVYCPSGEKCPLVGSNVPWAFMQGEIATILAGDVKVKKERDP

SEQ ID NO: 107 - protein, 388 aa, Synthetic construct
MTASVLLHPRWIEPTVMFLYDNGGGLVADELNKNMEGAAAAAAAAAAAAAAGAGGGGFPHPAAAAAGGNFSVAAAAAAAAAAAANQCRNLMAHPAPLAPGAASAYSSAPGEAPPSAAAAAAAAAAAAAAAAAASSSGGPGPAGPAGAEAAKQCSPCSAAAQSSSGPAALPYGYFGSGYYPCARMGPHPNAIKSCAQPASAAAAAAFADKYMDTAGPAAEEFSSRAKEFAFYHQGYAAGPYHHHQPMPGYLDMPVVPGLGGPGESRHEPLGLPMESYQPWALPNGWNGQMYCPKEQAQPPHLWKSTLPDVVSHPSDASSYRRGRKKRVPYTKVQLKELEREYATNKFITKDKRRRISATTNLSERQVTIWFQNRRVKEKKVINKLKTTS

SEQ ID NO: 108 - protein, 284 aa, Synthetic construct
MEPGNYATLDGAKDIEGLLGAGGGRNLVAHSPLTSHPAAPTLMPAVNYAPLDLPGSAEPPKQCHPCPGVPQGTSPAPVPYGYFGGGYYSCRVSRSSLKPCAQAATLAAYPAETPTAGEEYPSRPTEFAFYPGYPGTYQPMASYLDVSVVQTLGAPGEPRHDSLLPVDSYQSWALAGGWNSQMCCQGEQNPPGPFWKAAFADSSGQHPPDACAFRRGRKKRIPYSKGQLRELEREYAANKFITKDKRRKISAATSLSERQITIWFQNRRVKEKKVLAKVKNSATP

SEQ ID NO: 109 - protein, 330 aa, Synthetic construct
MTTSLLLHPRWPESLMYVYEDSAAESGIGGGGGGGGGGTGGAGGGCSGASPGKAPSMDGLGSSCPASHCRDLLPHPVLGRPPAPLGAPQGAVYTDIPAPEAARQCAPPPAPPTSSSATLGYGYPFGGSYYGCRLSHNVNLQQKPCAYHPGDKYPEPSGALPGDDLSSRAKEFAFYPSFASSYQAMPGYLDVSVVPGISGHPEPRHDALIPVEGYQHWALSNGWDSQVYCSKEQSQSAHLWKSPFPDVVPLQPEVSSYRRGRKKRVPYTKVQLKELEKEYAASKFITKEKRRRISATTNLSERQVTIWFQNRRVKEKKVVSKSKAPHLHST

SEQ ID NO: 110 - protein, 313 aa, Synthetic construct
MDFDERGPCSSNMYLPSCTYYVSGPDFSSLPSFLPQTPSSRPMTYSYSSNLPQVQPVREVTFREYAIEPATKWHPRGNLAHCYSAEELVHRDCLQAPSAAGVPGDVLAKSSANVYHHPTPAVSSNFYSTVGRNGVLPQAFDQFFETAYGTPENLASSDYPGDKSAEKGPPAATATSAAAAAAATGAPATSSSDSGGGGGCRETAAAAEEKERRRRPESSSSPESSSGHTEDKAGGSSGQRTRKKRCPYTKYQIRELEREFFFSVYINKEKRLQLSRMLNLTDRQVKIWFQNRRMKEKKINRDRLQYYSANPLL

SEQ ID NO: 111 - protein, 304 aa, Synthetic construct
MFNSVNLGNFCSPSRKERGADFGERGSCASNLYLPSCTYYMPEFSTVSSFLPQAPSRQISYPYSAQVPPVREVSYGLEPSGKWHHRNSYSSCYAAADELMHRECLPPSTVTEILMKNEGSYGGHHHPSAPHATPAGFYSSVNKNSVLPQAFDRFFDNAYCGGGDPPAEPPCSGKGEAKGEPEAPPASGLASRAEAGAEAEAEEENTNPSSSGSAHSVAKEPAKGAAPNAPRTRKKRCPYSKFQIRELEREFFFNVYINKEKRLQLSRMLNLTDRQVKIWFQNRRMKEKKLSRDRLQYFSGNPLL

SEQ ID NO: 112 - protein, 342 aa, Synthetic construct
MTCPRNVTPNSYAEPLAAPGGGERYSRSAGMYMQSGSDFNCGVMRGCGLAPSLSKRDEGSSPSLALNTYPSYLSQLDSWGDPKAAYRLEQPVGRPLSSCSYPPSVKEENVCCMYSAEKRAKSGPEAALYSHPLPESCLGEHEVPVPSYYRASPSYSALDKTPHCSGANDFEAPFEQRASLNPRAEHLESPQLGGKVSFPETPKSDSQTPSPNEIKTEQSLAGPKGSPSESEKERAKAADSSPDTSDNEAKEEIKAENTTGNWLTAKSGRKKRCPYTKHQTLELEKEFLFNMYLTRERRLEISKTINLTDRQVKIWFQNRRMKLKKMNRENRIRELTSNFNFT

SEQ ID NO: 113 - protein, 410 aa, Synthetic construct
MSARKGYLLPSPNYPTTMSCSESPAANSFLVDSLISSGRGEAGGGGGGAGGGGGGGYYAHGGVYLPPAADLPYGLQSCGLFPTLGGKRNEAASPGSGGGGGGLGPGAHGYGPSPIDLWLDAPRSCRMEPPDGPPPPPQQQPPPPPQPPQPAPQATSCSFAQNIKEESSYCLYDSADKCPKVSATAAELAPFPRGPPPDGCALGTSSGVPVPGYFRLSQAYGTAKGYGSGGGGAQQLGAGPFPAQPPGRGFDLPPALASGSADAARKERALDSPPPPTLACGSGGGSQGDEEAHASSSAAEELSPAPSESSKASPEKDSLGNSKGENAANWLTAKSGRKKRCPYTKHQTLELEKEFLFNMYLTRERRLEISRSVHLTDRQVKIWFQNRRMKLKKMNRENRIRELTANFNFS

SEQ ID NO: 114 - protein, 250 aa, Synthetic construct
MSISGTLSSYYVDSIISHESEDAPPAKFPSGQYASSRQPGHAEHLEFPSCSFQPKAPVFGASWAPLSPHASGSLPSVYHPYIQPQGVPPAESRYLRTWLEPAPRGEAAPGQGQAAVKAEPLLGAPGELLKQGTPEYSLETSAGREAVLSNQRPGYGDNKICEGSEDKERPDQTNPSANWLHARSSRKKRCPYTKYQTLELEKEFLFNMYLTRDRRHEVARLLNLSERQVKIWFQNRRMKMKKMNKEQGKE

SEQ ID NO: 115 - protein, 272 aa, Synthetic construct
MATTGALGNYYVDSFLLGADAADELSVGRYAPGTLGQPPRQAATLAEHPDFSPCSFQSKATVFGASWNPVHAAGANAVPAAVYHHHHHHPYVHPQAPVAAAAPDGRYMRSWLEPTPGALSFAGLPSSRPYGIKPEPLSARRGDCPTLDTHTLSLTDYACGSPPVDREKQPSEGAFSENNAENESGGDKPPIDPNNPAANWLHARSTRKKRCPYTKHQTLELEKEFLFNMYLTRDRRYEVARLLNLTERQVKIWFQNRRMKMKKINKDRAKDE

SEQ ID NO: 116 - protein, 80 aa, Homo sapiens
NKKLEAVGTGIEPKAMSQGLVTFGDVAVDFSQEEWEWLNPIQRNLYRKVMLENYRNLASLGLCVSKPDVISSLEQGKEPW

SEQ ID NO: 117 - protein, 80 aa, Homo sapiens
KMKKFQIPVSFQDLTVNFTQEEWQQLDPAQRLLYRDVMLENYSNLVSVGYHVSKPDVIFKLEQGEEPWIVEEFSNQNYPD

SEQ ID NO: 118 - protein, 80 aa, Homo sapiens
CSQESALSEEEEDTTRPLETVTFKDVAVDLTQEEWEQMKPAQRNLYRDVMLENYSNLVTVGCQVTKPDVIFKLEQEEEPW

SEQ ID NO: 119 - protein, 80 aa, Homo sapiens
ITSQGSVSFRDVTVGFTQEEWQHLDPAQRTLYRDVMLENYSHLVSVGYCIPKPEVILKLEKGEEPWILEEKFPSQSHLEL

SEQ ID NO: 120 - protein, 80 aa, Homo sapiens
PQVTFNDVAIDFTHEEWGWLSSAQRDLYKDVMVQNYENLVSVAGLSVTKPYVITLLEDGKEPWMMEKKLSKGMIPDWESR

SEQ ID NO: 121 - protein, 80 aa, Homo sapiens
PLRFSTLFQEQQKMNISQASVSFKDVTIEFTQEEWQQMAPVQKNLYRDVMLENYSNLVSVGYCCFKPEVIFKLEQGEEPW

SEQ ID NO: 122 - protein, 80 aa, Homo sapiens
QDPSAEGLSEEVPVVFEELPVVFEDVAVYFTREEWGMLDKRQKELYRDVMRMNYELLASLGPAAAKPDLISKLERRAAPW

SEQ ID NO: 123 - protein, 80 aa, Homo sapiens
SQGSVTFRDVAIDFSQEEWKWLQPAQRDLYRCVMLENYGHLVSLGLSISKPDVVSLLEQGKEPWLGKREVKRDLFSVSES

SEQ ID NO: 124 - protein, 80 aa, Homo sapiens
GSLTFRDVAIEFSLEEWQCLDTAQQNLYRNVMLENYRNLVFLGIAAFKPDLIIFLEEGKESWNMKRHEMVEESPVICSHF

SEQ ID NO: 125 - protein, 80 aa, Homo sapiens
NKSQEQVSFKDVCVDFTQEEWYLLDPAQKILYRDVILENYSNLVSVGYCITKPEVIFKIEQGEEPWILEKGFPSQCHPER

SEQ ID NO: 126 - protein, 80 aa, Homo sapiens
PHLLVTFRDVAIDFSQEEWECLDPAQRDLYRDVMLENYSNLISLDLESSCVTKKLSPEKEIYEMESLQWENMGKRINHHL

SEQ ID NO: 127 - protein, 80 aa, Homo sapiens
EEERKTAELQKNRIQDSVVFEDVAVDFTQEEWALLDLAQRNLYRDVMLENFQNLASLGYPLHTPHLISQWEQEEDLQTVK

SEQ ID NO: 128 - protein, 80 aa, Homo sapiens
GLLTFRDVAIEFSLEEWQCLDTAQKNLYRNVMLENYRNLAFLGIAVSKPDLIICLEKEKEPWNMKRDEMVDEPPGICPHF

SEQ ID NO: 129 - protein, 80 aa, Homo sapiens
RAPTQVTVSPETHMDLTKGCVTFEDIAIYFSQDEWGLLDEAQRLLYLEVMLENFALVASLGCGHGTEDEETPSDQNVSVG

SEQ ID NO: 130 - protein, 80 aa, Homo sapiens
AAVSPTTRCQESVTFEDVAVVFTDEEWSRLVPIQRDLYKEVMLENYNSIVSLGLPVPQPDVIFQLKRGDKPWMVDLHGSE

SEQ ID NO: 131 - protein, 80 aa, Homo sapiens
HSLEKVTFEDVAIDFTQEEWDMMDTSKRKLYRDVMLENISHLVSLGYQISKSYIILQLEQGKELWREGRVFLQDQNPDRE

SEQ ID NO: 132 - protein, 80 aa, Homo sapiens
DSVSFEDVAVNFTLEEWALLDSSQKKLYEDVMQETFKNLVCLGKKWEDQDIEDDHRNQGKNRRCHMVERLCESRRGSKCG

SEQ ID NO: 133 - protein, 80 aa, Homo sapiens
NVEVVKVMPQDLVTFKDVAIDFSQEEWQWMNPAQKRLYRSMMLENYQSLVSLGLCISKPYVISLLEQGREPWEMTSEMTR

SEQ ID NO: 134 - protein, 80 aa, Homo sapiens
TQPDEDLHLQAEETQLVKESVTFKDVAIDFTLEEWRLMDPTQRNLHKDVMLENYRNLVSLGLAVSKPDMISHLENGKGPW

SEQ ID NO: 135 - protein, 80 aa, Homo sapiens
TMLQESFSFDDLSVDFTQKEWQLLDPSQKNLYKDVMLENYSSLVSLGYEVMKPDVIFKLEQGEEPWVGDGEIPSSDSPEV

SEQ ID NO: 136 - protein, 80 aa, Homo sapiens
EVVTFGDVAVHFSREEWQCLDPGQRALYREVMLENHSSVAGLAGFLVFKPELISRLEQGEEPWVLDLQGAEGTEAPRTSK

SEQ ID NO: 137 - protein, 80 aa, Homo sapiens
RNAEEERMIAVFLTTWLQEPMTFKDVAVEFTQEEWMMLDSAQRSLYRDVMLENYRNLTSVEYQLYRLTVISPLDQEEIRN

SEQ ID NO: 138 - protein, 80 aa, Homo sapiens
GPQGARRQAFLAFGDVTVDFTQKEWRLLSPAQRALYREVTLENYSHLVSLGILHSKPELIRRLEQGEVPWGEERRRRPGP

SEQ ID NO: 139 - protein, 80 aa, Homo sapiens
HSLKKLTFEDVAIDFTQEEWAMMDTSKRKLYRDVMLENISHLVSLGYQISKSYIILQLEQGKELWREGRVFLQDQNPNRE

SEQ ID NO: 140 - protein, 80 aa, Homo sapiens
MPEVEFPDQFFTVLTMDHELVTLRDVVINFSQEEWEYLDSAQRNLYWDVMMENYSNLLSLDLESRNETKHLSVGKDIIQN

SEQ ID NO: 141 - protein, 80 aa, Homo sapiens
PGAPGSLEMGPLTFRDVTIEFSLEEWQCLDTVQQNLYRDVMLENYRNLVFLGMAVFKPDLITCLKQGKEPWNMKRHEMVT

SEQ ID NO: 142 - protein, 80 aa, Homo sapiens
RDPAQVPVAADLLTDHEEGYVTFEDVAVYFSQEEWRLLDDAQRLLYRNVMLENFTLLASLGLASSKTHEITQLESWEEPF

SEQ ID NO: 143 - protein, 80 aa, Homo sapiens
HSLKKVTFEDVAIDFTQEEWAMMDTSKRKLYRDVMLENISHLVSLGYQISKSYIILQLEQGKELWREGREFLQDQNPDRE

SEQ ID NO: 144 - protein, 80 aa, Homo sapiens
TKSKEAVTFKDVAVVFSEEELQLLDLAQRKLYRDVMLENFRNVVSVGHQSTPDGLPQLEREEKLWMMKMATQRDNSSGAK

SEQ ID NO: 145 - protein, 80 aa, Homo sapiens
SQVTFSDVAIDFSHEEWACLDSAQRDLYKDVMVQNYENLVSVGLSVTKPYVIMLLEDGKEPWMMEKKLSKAYPFPLSHSV

SEQ ID NO: 146 - protein, 80 aa, Homo sapiens
PGPLRSLEMESLQFRDVAVEFSLEEWHCLDTAQQNLYRDVMLENYRHLVFLGIIVSKPDLITCLEQGIKPLTMKRHEMIA

SEQ ID NO: 147 - protein, 80 aa, Homo sapiens
LQTTWPQESVTFEDVAVYFTQNQWASLDPAQRALYGEVMLENYANVASLVAFPFPKPALISHLERGEAPWGPDPWDTEIL

SEQ ID NO: 148 - protein, 80 aa, Homo sapiens
APLLAPRPGETRPGCRKPGTVSFADVAVYFSPEEWGCLRPAQRALYRDVMQETYGHLGALGFPGPKPALISWMEQESEAW

SEQ ID NO: 149 - protein, 80 aa, Homo sapiens
NKVEQKSQESVSFKDVTVGFTQEEWQHLDPSQRALYRDVMLENYSNLVSVGYCVHKPEVIFRLQQGEEPWKQEEEFPSQS

SEQ ID NO: 150 - protein, 80 aa, Homo sapiens
CFSQEERMAAGYLPRWSQELVTFEDVSMDFSQEEWELLEPAQKNLYREVMLENYRNVVSLEALKNQCTDVGIKEGPLSPA

SEQ ID NO: 151 - protein, 80 aa, Homo sapiens
DSVAFEDVAVNFTQEEWALLDPSQKNLYREVMQETLRNLTSIGKKWNNQYIEDEHQNPRRNLRRLIGERLSESKESHQHG

SEQ ID NO: 152 - protein, 80 aa, Homo sapiens
MGPAQVPMNSEVIVDPIQGQVNFEDVFVYFSQEEWVLLDEAQRLLYRDVMLENFALMASLGHTSFMSHIVASLVMGSEPW

SEQ ID NO: 153 - protein, 80 aa, Homo sapiens
TTFKEAMTFKDVAVVFTEEELGLLDLAQRKLYRDVMLENFRNLLSVGHQAFHRDTFHFLREEKIWMMKTAIQREGNSGDK

SEQ ID NO: 154 - protein, 80 aa, Homo sapiens
DSTLLQGGHNLLSSASFQEAVTFKDVIVDFTQEEWKQLDPGQRDLFRDVTLENYTHLVSIGLQVSKPDVISQLEQGTEPW

SEQ ID NO: 155 - protein, 80 aa, Homo sapiens
EARSMLVPPQASVCFEDVAMAFTQEEWEQLDLAQRTLYREVTLETWEHIVSLGLFLSKSDVISQLEQEEDLCRAEQEAPR

SEQ ID NO: 156 - protein, 80 aa, Homo sapiens
DSVVFEDVAVDFTLEEWALLDSAQRDLYRDVMLETFRNLASVDDGTQFKANGSVSLQDMYGQEKSKEQTIPNFTGNNSCA

SEQ ID NO: 157 - protein, 80 aa, Homo sapiens
EESHGALISSCNSRTMTDGLVTFRDVAIDFSQEEWECLDPAQRDLYVDVMLENYSNLVSLDLESKTYETKKIFSENDIFE

SEQ ID NO: 158 - protein, 80 aa, Homo sapiens
VITPQIPMVTEEFVKPSQGHVTFEDIAVYFSQEEWGLLDEAQRCLYHDVMLENFSLMASVGCLHGIEAEEAPSEQTLSAQ

SEQ ID NO: 159 - protein, 80 aa, Homo sapiens
VQLRPQTRMATALRDPASGSVTFEDVAVYFSWEEWDLLDEAQKHLYFDVMLENFALTSSLGCWCGVEHEETPSEQRISGE

SEQ ID NO: 160 - protein, 80 aa, Homo sapiens
MQAQESLTLEDVAVDFTWEEWQFLSPAQKDLYRDVMLENYSNLVAVGYQASKPDALSKLERGEETCTTEDEIYSRICSEI

SEQ ID NO: 161 - protein, 80 aa, Homo sapiens
GPLQFRDVAIEFSLEEWHCLDTAQRNLYRDVMLENYRNLVFLGIVVSKPDLVTCLEQGKKPLTMERHEMIAKPPVMSSHF

SEQ ID NO: 162 - protein, 80 aa, Homo sapiens
NMFKEAVTFKDVAVAFTEEELGLLGPAQRKLYRDVMVENFRNLLSVGHPPFKQDVSPIERNEQLWIMTTATRRQGNLGEK

SEQ ID NO: 163 - protein, 80 aa, Homo sapiens
GALTFRDVAIEFSLEEWQCLDTEQQNLYRNVMLDNYRNLVFLGIAVSKPDLITCLEQEKEPWNLKTHDMVAKPPVICSHI

SEQ ID NO: 164 - protein, 80 aa, Homo sapiens
SPQKSSALAPEDHGSSYEGSVSFRDVAIDFSREEWRHLDPSQRNLYRDVMLETYSHLLSVGYQVPEAEVVMLEQGKEPWA

SEQ ID NO: 165 - protein, 80 aa, Homo sapiens
ELLTFRDVAIEFSPEEWKCLDPAQQNLYRDVMLENYRNLISLGVAISNPDLVIYLEQRKEPYKVKIHETVAKHPAVCSHF

SEQ ID NO: 166 - protein, 80 aa, Homo sapiens
EPLKFRDVAIEFSLEEWQCLDTIQQNLYRNVMLENYRNLVFLGIVVSKPDLITCLEQEKEPWTRKRHRMVAEPPVICSHF

SEQ ID NO: 167 - protein, 80 aa, Homo sapiens
PSARGKSKSKAPITFGDLAIYFSQEEWEWLSPIQKDLYEDVMLENYRNLVSLGLSFRRPNVITLLEKGKAPWMVEPVRRR

SEQ ID NO: 168 - protein, 80 aa, Homo sapiens
TKAQESLTLEDVAVDFTWEEWQFLSPAQKDLYRDVMLENYSNLVSVGYQAGKPDALTKLEQGEPLWTLEDEIHSPAHPEI

SEQ ID NO: 169 - protein, 80 aa, Homo sapiens
SQEEVEVAGIKLCKAMSLGSVTFTDVAIDFSQDEWEWLNLAQRSLYKKVMLENYRNLVSVGLCISKPDVISLLEQEKDPW

SEQ ID NO: 170 - protein, 80 aa, Homo sapiens
TKSLESVSFKDVTVDFSRDEWQQLDLAQKSLYREVMLENYFNLISVGCQVPKPEVIFSLEQEEPCMLDGEIPSQSRPDGD

SEQ ID NO: 171 - protein, 80 aa, Homo sapiens
SGCPGAERNLLVYSYFEKETLTFRDVAIEFSLEEWECLNPAQQNLYMNVMLENYKNLVFLGVAVSKQDPVTCLEQEKEPW

SEQ ID NO: 172 - protein, 80 aa, Homo sapiens
PLQGSVSFKDVTVDFTQEEWQQLDPAQKALYRDVMLENYCHFVSVGFHMAKPDMIRKLEQGEELWTQRIFPSYSYLEEDG

SEQ ID NO: 173 - protein, 80 aa, Homo sapiens
PGPPRSLEMGLLTFRDVAIEFSLEEWQHLDIAQQNLYRNVMLENYRNLAFLGIAVSKPDLITCLEQGKEPWNMKRHEMVD

SEQ ID NO: 174 - protein, 80 aa, Homo sapiens
SGHPGSWEMNSVAFEDVAVNFTQEEWALLDPSQKNLYRDVMQETFRNLASIGNKGEDQSIEDQYKNSSRNLRHIISHSGN

SEQ ID NO: 175 - protein, 80 aa, Homo sapiens
SYGSITFGDVAIDFSHQEWEYLSLVQKTLYQEVMMENYDNLVSLAGHSVSKPDLITLLEQGKEPWMIVREETRGECTDLD

SEQ ID NO: 176 - protein, 80 aa, Homo sapiens
DLFVCSGLEPHTPSVGSQESVTFQDVAVDFTEKEWPLLDSSQRKLYKDVMLENYSNLTSLGYQVGKPSLISHLEQEEEPR

SEQ ID NO: 177 - protein, 80 aa, Homo sapiens
FQTAWRQEPVTFEDVAVYFTQNEWASLDSVQRALYREVMLENYANVASLAFPFTTPVLVSQLEQGELPWGLDPWEPMGRE

SEQ ID NO: 178 - protein, 80 aa, Homo sapiens
ELLTFRDVAIEFSPEEWKCLDPDQQNLYRDVMLENYRNLVSLGVAISNPDLVTCLEQRKEPYNVKIHKIVARPPAMCSHF

SEQ ID NO: 179 - protein, 80 aa, Homo sapiens
AGEAEAQLDPSLQGLVMFEDVTVYFSREEWGLLNVTQKGLYRDVMLENFALVSSLGLAPSRSPVFTQLEDDEQSWVPSWV

SEQ ID NO: 180 - protein, 80 aa, Homo sapiens
AHALVTFRDVAIDFSQKEWECLDTTQRKLYRDVMLENYNNLVSLGYSGSKPDVITLLEQGKEPCVVARDVTGRQCPGLLS

SEQ ID NO: 181 - protein, 80 aa, Homo sapiens
KRIKHWKMASKLILPESLSLLTFEDVAVYFSEEEWQLLNPLEKTLYNDVMQDIYETVISLGLKLKNDTGNDHPISVSTSE

SEQ ID NO: 182 - protein, 80 aa, Homo sapiens
DSVVFEDVAVDFTLEEWALLDSAQRDLYRDVMLETFQNLASVDDETQFKASGSVSQQDIYGEKIPKESKIATFTRNVSWA

SEQ ID NO: 183 - protein, 80 aa, Homo sapiens
NMSQASVSFQDVTVEFTREEWQHLGPVERTLYRDVMLENYSHLISVGYCITKPKVISKLEKGEEPWSLEDEFLNQRYPGY

SEQ ID NO: 184 - protein, 80 aa, Homo sapiens
ISFQESVTFQDVAVDFTAEEWQLLDCAERTLYWDVMLENYRNLISVGCPITKTKVILKVEQGQEPWMVEGANPHESSPES

SEQ ID NO: 185 - protein, 80 aa, Homo sapiens
NTLQGPVSFKDVAVDFTQEEWQQLDPDEKITYRDVMLENYSHLVSVGYDTTKPNVIIKLEQGEEPWIMGGEFPCQHSPEA

SEQ ID NO: 186 - protein, 80 aa, Homo sapiens
HPEEEERMHDELLQAVSKGPVMFRDVSIDFSQEEWECLDADQMNLYKEVMLENFSNLVSVGLSNSKPAVISLLEQGKEPW

SEQ ID NO: 187 - protein, 80 aa, Homo sapiens
SLGSELFRDVAIVFSQEEWQWLAPAQRDLYRDVMLETYSNLVSLGLAVSKPDVISFLEQGKEPWMVERVVSGGLCPVLES

SEQ ID NO: 188 - protein, 80 aa, Homo sapiens
TKFQEMVTFKDVAVVFTEEELGLLDSVQRKLYRDVMLENFRNLLLVAHQPFKPDLISQLEREEKLLMVETETPRDGCSGR

SEQ ID NO: 189 - protein, 80 aa, Homo sapiens
AKRPGPPGSREMGLLTFRDIAIEFSLAEWQCLDHAQQNLYRDVMLENYRNLVSLGIAVSKPDLITCLEQNKEPQNIKRNE

SEQ ID NO: 190 - protein, 80 aa, Homo sapiens
TCMVHRQTMSCSGAGGITAFVAFRDVAVYFTQEEWRLLSPAQRTLHREVMLETYNHLVSLEIPSSKPKLIAQLERGEAPW

SEQ ID NO: 191 - protein, 80 aa, Homo sapiens
IQAQESITLEDVAVDFTWEEWQLLGAAQKDLYRDVMLENYSNLVAVGYQASKPDALFKLEQGEQLWTIEDGIHSGACSDI

SEQ ID NO: 192 - protein, 80 aa, Homo sapiens
AQKRRKRKAKESGMALPQGHLTFRDVAIEFSQAEWKCLDPAQRALYKDVMLENYRNLVSLGISLPDLNINSMLEQRREPW

SEQ ID NO: 193 - protein, 80 aa, Homo sapiens
DSTSVPVTAEAKLMGFTQGCVTFEDVAIYFSQEEWGLLDEAQRLLYRDVMLENFALITALVCWHGMEDEETPEQSVSVEG

SEQ ID NO: 194 - protein, 80 aa, Homo sapiens
GPLTFRDVKIEFSLEEWQCLDTAQRNLYRDVMLENYRNLVFLGIAVSKPDLITWLEQGKEPWNLKRHEMVDKTPVMCSHF

SEQ ID NO: 195 - protein, 80 aa, Homo sapiens
SGCPGAERSLLVQSYFEKGPLTFRDVAIEFSLEEWQCLDSAQQGLYRKVMLENYRNLVFLAGIALTKPDLITCLEQGKEP

SEQ ID NO: 196 - protein, 80 aa, Homo sapiens
GVLTFRDVAVEFSPEEWECLDSAQQRLYRDVMLENYGNLVSLGLAIFKPDLMTCLEQRKEPWKVKRQEAVAKHPAGSFHF

SEQ ID NO: 197 - protein, 80 aa, Homo sapiens
KENLEDISGWGLPEARSKESVSFKDVAVDFTQEEWGQLDSPQRALYRDVMLENYQNLLALGPPLHKPDVISHLERGEEPW

SEQ ID NO: 198 - protein, 80 aa, Homo sapiens
EESEKPRGFARGLEPERIIGATDSSGELMFLMKWKNSDEADLVPAKEANVKCPQVVISFYEERLTWHSYPSEDDDKKDDK

SEQ ID NO: 199 - protein, 80 aa, Homo sapiens
ASVALEDVAVNFTREEWALLGPCQKNLYKDVMQETIRNLDCVVMKWKDQNIEDQYRYPRKNLRCRMLERFVESKDGTQCG

SEQ ID NO: 200 - protein, 80 aa, Homo sapiens
TLLTFRDVAIEFSLEEWKCLDLAQQNLYRDVMLENYRNLFSVGLTVCKPGLITCLEQRKEPWNVKRQEAADGHPEMGFHH

SEQ ID NO: 201 - protein, 80 aa, Homo sapiens
AAALRAPTQQVFVAFEDVAIYFSQEEWELLDEMQRLLYRDVMLENFAVMASLGCWCGAVDEGTPSAESVSVEELSQGRTP

SEQ ID NO: 202 - protein, 80 aa, Homo sapiens
NTFQASVSFQDVTVEFSQEEWQHMGPVERTLYRDVMLENYSHLVSVGYCFTKPELIFTLEQGEDPWLLEKEKGFLSRNSP

SEQ ID NO: 203 - protein, 80 aa, Homo sapiens
DSVAFEDVSVSFSQEEWALLAPSQKKLYRDVMQETFKNLASIGEKWEDPNVEDQHKNQGRNLRSHTGERLCEGKEGSQCA

SEQ ID NO: 204 - protein, 80 aa, Homo sapiens
AQGLVTFADVAIDFSQEEWACLNSAQRDLYWDVMLENYSNLVSLDLESAYENKSLPTEKNIHEIRASKRNSDRRSKSLGR

SEQ ID NO: 205 - protein, 80 aa, Homo sapiens
AVDLLSAQEPVTFRDVAVFFSQDEWLHLDSAQRALYREVMLENYSSLVSLGIPFSMPKLIHQLQQGEDPCMVEREVPSDT

SEQ ID NO: 206 - protein, 80 aa, Homo sapiens
SPQRFPALIPGEPGRSFEGSVSFEDVAVDFTRQEWHRLDPAQRTMHKDVMLETYSNLASVGLCVAKPEMIFKLERGEELW

SEQ ID NO: 207 - protein, 80 aa, Homo sapiens
RVLTFRDVAVEFSPEEWECLDSAQQRLYRDVMLENYGNLFSLGLAIFKPDLITYLEQRKEPWNARRQKTVAKHPAGSLHF

SEQ ID NO: 208 - protein, 80 aa, Homo sapiens
AETKDAAQMLVTFKDVAVTFTREEWRQLDLAQRTLYREVMLETCGLLVSLGHRVPKPELVHLLEHGQELWIVKRGLSHAT

SEQ ID NO: 209 - protein, 80 aa, Homo sapiens
IEYQIPVSFKDVVVGFTQEEWHRLSPAQRALYRDVMLETYSNLVSVGYEGTKPDVILRLEQEEAPWIGEAACPGCHCWED

SEQ ID NO: 210 - protein, 80 aa, Homo sapiens
TKFQEAVTFKDVAVAFTEEELGLLDSAQRKLYRDVMLENFRNLVSVGHQSFKPDMISQLEREEKLWMKELQTQRGKHSGD

SEQ ID NO: 211 - protein, 80 aa, Homo sapiens
DEGVAGVMSVGPPAARLQEPVTFRDVAVDFTQEEWGQLDPTQRILYRDVMLETFGHLLSIGPELPKPEVISQLEQGTELW

SEQ ID NO: 212 - protein, 80 aa, Homo sapiens
GPLTFMDVAIEFSVEEWQCLDTAQQNLYRNVMLENYRNLVFLGIAVSKPDLITCLEQGKEPWNMERHEMVAKPPGMCCYF

SEQ ID NO: 213 - protein, 80 aa, Homo sapiens
HQVGLIRSYNSKTMTCFQELVTFRDVAIDFSRQEWEYLDPNQRDLYRDVMLENYRNLVSLGGHSISKPVVVDLLERGKEP

SEQ ID NO: 214 - protein, 80 aa, Homo sapiens
NATIVMSVRREQGSSSGEGSLSFEDVAVGFTREEWQFLDQSQKVLYKEVMLENYINLVSIGYRGTKPDSLFKLEQGEPPG

SEQ ID NO: 215 - protein, 80 aa, Homo sapiens
FPPARGKELLSFEDVAMYFTREEWGHLNWGQKDLYRDVMLENYRNMVLLGFQFPKPEMICQLENWDEQWILDLPRTGNRK

SEQ ID NO: 216 - protein, 80 aa, Homo sapiens
ELLTFKDVAIEFSPEEWKCLDTSQQNLYRDVMLENYRNLVSLGVSISNPDLVTSLEQRKEPYNLKIHETAARPPAVCSHF

SEQ ID NO: 217 - protein, 80 aa, Homo sapiens
MKSQGLVSFKDVAVDFTQEEWQQLDPSQRTLYRDVMLENYSHLVSMGYPVSKPDVISKLEQGEEPWIIKGDISNWIYPDE

SEQ ID NO: 218 - protein, 80 aa, Homo sapiens
AEGSVMFSDVSIDFSQEEWDCLDPVQRDLYRDVMLENYGNLVSMGLYTPKPQVISLLEQGKEPWMVGRELTRGLCSDLES

SEQ ID NO: 219 - protein, 80 aa, Homo sapiens
GPLTFTDVAIEFSLEEWQCLDTAQQNLYRNVMLENYRNLVFLGIAVSKPDLITCLEKEKEPCKMKRHEMVDEPPVVCSHF

SEQ ID NO: 220 - protein, 80 aa, Homo sapiens
ALSQGLFTFKDVAIEFSQEEWECLDPAQRALYRDVMLENYRNLLSLDEDNIPPEDDISVGFTSKGLSPKENNKEELYHLV

SEQ ID NO: 221 - protein, 80 aa, Homo sapiens
NMEGLVMFQDLSIDFSQEEWECLDAAQKDLYRDVMMENYSSLVSLGLSIPKPDVISLLEQGKEPWMVSRDVLGGWCRDSE

SEQ ID NO: 222 - protein, 80 aa, Homo sapiens
AVSHLPTMVQESVTFKDVAILFTQEEWGQLSPAQRALYRDVMLENYSNLVSLGLLGPKPDTFSQLEKREVWMPEDTPGGF

SEQ ID NO: 223 - protein, 80 aa, Homo sapiens
GPLTIRDVTVEFSLEEWHCLDTAQQNLYRDVMLENYRNLVFLGIAVSKPDLITCLEQGKEPCNMKRHEMVAKPPVMCSHI

SEQ ID NO: 224 - protein, 80 aa, Homo sapiens
AAAVLTDRAQVSVTFDDVAVTFTKEEWGQLDLAQRTLYQEVMLENCGLLVSLGCPVPKAELICHLEHGQEPWTRKEDLSQ

SEQ ID NO: 225 - protein, 80 aa, Homo sapiens
ALRSVMFSDVSIDFSPEEWEYLDLEQKDLYRDVMLENYSNLVSLGCFISKPDVISSLEQGKEPWKVVRKGRRQYPDLETK

SEQ ID NO: 226 - protein, 80 aa, Homo sapiens
AHGSVTFRDVAIDFSQEEWEFLDPAQRDLYRDVMWENYSNFISLGPSISKPDVITLLDEERKEPGMVVREGTRRYCPDLE

SEQ ID NO: 227 - protein, 80 aa, Homo sapiens
APRAQIQGPLTFGDVAVAFTRIEWRHLDAAQRALYRDVMLENYGNLVSVGLLSSKPKLITQLEQGAEPWTEVREAPSGTH

SEQ ID NO: 228 - protein, 80 aa, Homo sapiens
GPLQFRDVAIEFSLEEWHCLDTAQRNLYRNVMLENYRNLVFLGIVVSKPDLITCLEQGKKPLTMKKHEMVANPSVTCSHF

SEQ ID NO: 229 - protein, 80 aa, Homo sapiens
TLPRGQPEVLEWGLPKDQDSVAFEDVAVNFTHEEWALLGPSQKNLYRDVMRETIRNLNCIGMKWENQNIDDQHQNLRRNP

SEQ ID NO: 230 - protein, 80 aa, Homo sapiens
PSPDSMTFEDIIVDFTQEEWALLDTSQRKLFQDVMLENISHLVSIGKQLCKSVVLSQLEQVEKLSTQRISLLQGREVGIK

SEQ ID NO: 231 - protein, 80 aa, Homo sapiens
EESREIRAGQIVLKAMAQGLVTFRDVAIEFSLEEWKCLEPAQRDLYREVTLENFGHLASLGLSISKPDVVSLLEQGKEPW

SEQ ID NO: 232 - protein, 80 aa, Homo sapiens
AASAQVSVTFEDVAVTFTQEEWGQLDAAQRTLYQEVMLETCGLLMSLGCPLFKPELIYQLDHRQELWMATKDLSQSSYPG

SEQ ID NO: 233 - protein, 80 aa, Homo sapiens
RESLEDEVTPGLPTAESQELLTFKDISIDFTQEEWGQLAPAHQNLYREVMLENYSNLVSVGYQLSKPSVISQLEKGEEPW

SEQ ID NO: 234 - protein, 80 aa, Homo sapiens
EGEYIKLKVIGQDSSEIHFKVKMTTHLKKLKESYCQRQGVPMNSLRFLFEGQRIADNHTPKELGMEEEDVIEVYQEQTGG

SEQ ID NO: 235 - protein, 80 aa, Homo sapiens
NKSLGPVSFKDVAVDFTQEEWQQLDPEQKITYRDVMLENYSNLVSVGYHIIKPDVISKLEQGEEPWIVEGEFLLQSYPDE

SEQ ID NO: 236 - protein, 80 aa, Homo sapiens
SPGLLTTRKEALMAFRDVAVAFTQKEWKLLSSAQRTLYREVMLENYSHLVSLGIAFSKPKLIEQLEQGDEPWREENEHLL

SEQ ID NO: 237 - protein, 80 aa, Homo sapiens
MFQDSVAFEDVAVTFTQEEWALLDPSQKNLCRDVMQETFRNLASIGKKWKPQNIYVEYENLRRNLRIVGERLFESKEGHQ

SEQ ID NO: 238 - protein, 80 aa, Homo sapiens
ENDHINLKVAGQDGSVVQFKIKRHTPLSKLMKAYCERQGLSMRQIRFRFDGQPINETDTPAQLEMEDEDTIDVFQQQTGG

SEQ ID NO: 239 - protein, 80 aa, Homo sapiens
PGPLGSLEMGVLTFRDVALEFSLEEWQCLDTAQQNLYRNVMLENYRNLVFVGIAASKPDLITCLEQGKEPWNVKRHEMVT

SEQ ID NO: 240 - protein, 80 aa, Homo sapiens
LSQKPQVLGPEKQDGSCEASVSFEDVTVDFSREEWQQLDPAQRCLYRDVMLELYSHLFAVGYHIPNPEVIFRMLKEKEPR

SEQ ID NO: 241 - protein, 80 aa, Homo sapiens
ALTQGQVTFRDVAIEFSQEEWTCLDPAQRTLYRDVMLENYRNLASLGISCFDLSIISMLEQGKEPFTLESQVQIAGNPDG

SEQ ID NO: 242 - protein, 80 aa, Homo sapiens
NKFQGPVTLKDVIVEFTKEEWKLLTPAQRTLYKDVMLENYSHLVSVGYHVNKPNAVFKLKQGKEPWILEVEFPHRGFPED

SEQ ID NO: 243 - protein, 80 aa, Homo sapiens
ELLTFRDVAIEFSPEEWKCLDPAQQNLYRDVMLENYRNLVSLAVYSYYNQGILPEQGIQDSFKKATLGRYGSCGLENICL

SEQ ID NO: 244 - protein, 80 aa, Homo sapiens
SPQKSSALAPEDHGSSYEGSVSFRDVAIDFSREEWRHLDLSQRNLYRDVMLETYSHLLSVGYQVPKPEVVMLEQGKEPWA

SEQ ID NO: 245 - protein, 80 aa, Homo sapiens
NNSQGRVTFEDVTVNFTQGEWQRLNPEQRNLYRDVMLENYSNLVSVGQGETTKPDVILRLEQGKEPWLEEEEVLGSGRAE

SEQ ID NO: 246 - protein, 80 aa, Homo sapiens
AMALPMPGPQEAVVFEDVAVYFTRIEWSCLAPDQQALYRDVMLENYGNLASLGFLVAKPALISLLEQGEEPGALILQVAE

SEQ ID NO: 247 - protein, 80 aa, Homo sapiens
DSSQHLVTFEDVAVDFTQEEWTLLDQAQRDLYRDVMLENYKNLIILAGSELFKRSLMSGLEQMEELRTGVTGVLQELDLQ

SEQ ID NO: 248 - protein, 80 aa, Homo sapiens
TTFKEAVTFKDVAVFFTEEELGLLDPAQRKLYQDVMLENFTNLLSVGHQPFHPFHFLREEKFWMMETATQREGNSGGKTI

SEQ ID NO: 249 - protein, 80 aa, Homo sapiens
GPLQFRDVAIEFSLEEWHCLDMAQRNLYRDVMLENYRNLVFLGIVVSKPDLITHLEQGKKPSTMQRHEMVANPSVLCSHF

SEQ ID NO: 250 - protein, 80 aa, Homo sapiens
NKSQGSVSFTDVTVDFTQEEWEQLDPSQRILYMDVMLENYSNLLSVEVWKADDQMERDHRNPDEQARQFLILKNQTPIEE

SEQ ID NO: 251 - protein, 80 aa, Homo sapiens
EEEEMNDGSQMVRSQESLTFQDVAVDFTREEWDQLYPAQKNLYRDVMLENYRNLVALGYQLCKPEVIAQLELEEEWVIER

SEQ ID NO: 252 - protein, 80 aa, Homo sapiens
EEATKKSKEKEPGMALPQGRLTFRDVAIEFSLEEWKCLNPAQRALYRAVMLENYRNLEFVDSSLKSMMEFSSTRHSITGE

SEQ ID NO: 253 - protein, 80 aa, Homo sapiens
EKTPAGRIVADCLTDCYQDSVTFDDVAVDFTQEEWTLLDSTQRSLYSDVMLENYKNLATVGGQIIKPSLISWLEQEESRT

SEQ ID NO: 254 - protein, 80 aa, Homo sapiens
AMSQESLTFKDVFVDFTLEEWQQLDSAQKNLYRDVMLENYSHLVSVGHLVGKPDVIFRLGPGDESWMADGGTPVRTCAGE

SEQ ID NO: 255 - protein, 80 aa, Homo sapiens
DSVAFEDVAVNFTLEEWALLDPSQKNLYRDVMRETFRNLASVGKQWEDQNIEDPFKIPRRNISHIPERLCESKEGGQGEE

SEQ ID NO: 256 - protein, 80 aa, Homo sapiens
MFQDSVAFEDVAVSFTQEEWALLDPSQKNLYRDVMQETFKNLTSVGKTWKVQNIEDEYKNPRRNLSLMREKLCESKESHH

SEQ ID NO: 257 - protein, 80 aa, Homo sapiens
AVVATLRLSAQGTVTFEDVAVKFTQEEWNLLSEAQRCLYRDVTLENLALMSSLGCWCGVEDEAAPSKQSIYIQRETQVRT

SEQ ID NO: 258 - protein, 80 aa, Homo sapiens
EEEEEDEDEDDLLTAGCQELVTFEDVAVYFSLEEWERLEADQRGLYQEVMQENYGILVSLGYPIPKPDLIFRLEQGEEPW

SEQ ID NO: 259 - protein, 80 aa, Homo sapiens
TKFQEMVTFKDVAVVFTREELGLLDLAQRKLYQDVMLENFRNLLSVGYQPFKLDVILQLGKEDKLRMMETEIQGDGCSGH

SEQ ID NO: 260 - protein, 80 aa, Homo sapiens
EEAAQKRKGKEPGMALPQGRLTFRDVAIEFSLAEWKCLNPSQRALYREVMLENYRNLEAVDISSKCMMKEVLSTGQGNTE

SEQ ID NO: 261 - protein, 80 aa, Homo sapiens
DTVVFEDVVVDFTLEEWALLNPAQRKLYRDVMLETFKHLASVDNEAQLKASGSISQQDTSGEKLSLKQKIEKFTRKNIWA

SEQ ID NO: 262 - protein, 80 aa, Homo sapiens
TTFKEGLTFKDVAVVFTEEELGLLDPVQRNLYQDVMLENFRNLLSVGHHPFKHDVFLLEKEKKLDIMKTATQRKGKSADK

SEQ ID NO: 263 - protein, 80 aa, Homo sapiens
SALQQEFWKIQTSNGIQMDLVTFDSVAVEFTQEEWTLLDPAQRNLYSDVMLENYKNLSSVGYQLFKPSLISWLEEEEELS

SEQ ID NO: 264 - protein, 80 aa, Homo sapiens
DCVIFEEVAVNFTPEEWALLDHAQRSLYRDVMLETCRNLASLDCYIYVRTSGSSSQRDVFGNGISNDEEIVKFTGSDSWS

SEQ ID NO: 265 - protein, 80 aa, Homo sapiens
ELLTFRDVTIEFSLEEWEFLNPAQQSLYRKVMLENYRNLVSLGLTVSKPELISRLEQRQEPWNVKRHETIAKPPAMSSHY

SEQ ID NO: 266 - protein, 80 aa, Homo sapiens
IKTQESLTLEDVAVEFSWEEWQLLDTAQKNLYRDVMVENYNHLVSLGYQTSKPDVLSKLAHGQEPWTTDAKIQNKNCPGI

SEQ ID NO: 267 - protein, 80 aa, Homo sapiens
PAHVPGEAGPRRTRESRPGAVSFADVAVYFSPEEWECLRPAQRALYRDVMRETFGHLGALGFSVPKPAFISWVEGEVEAW

SEQ ID NO: 268 - protein, 80 aa, Homo sapiens
GCPGDQVTPTRSLTAQLQETMTFKDVEVTFSQDEWGWLDSAQRNLYRDVMLENYRNMASLVGPFTKPALISWLEAREPWG

SEQ ID NO: 269 - protein, 80 aa, Homo sapiens
ARDLVMFRDVAVDFSQEEWECLNSYQRNLYRDVILENYSNLVSLAGCSISKPDVITLLEQGKEPWMVVRDEKRRWTLDLE

SEQ ID NO: 270 - protein, 80 aa, Homo sapiens
TTLKEAVTFKDVAVVFTEEELRLLDLAQRKLYREVMLENFRNLLSVGHQSLHRDTFHFLKEEKFWMMETATQREGNLGGK

SEQ ID NO: 271 - protein, 80 aa, Homo sapiens
SPPSPRSSMAAVALRDSAQGMTFEDVAIYFSQEEWELLDESQRFLYCDVMLENFAHVTSLGYCHGMENEAIASEQSVSIQ

SEQ ID NO: 272 - protein, 80 aa, Homo sapiens
DEEAQKRKAKESGMALPQGRLTFMDVAIEFSQEEWKSLDPGQRALYRDVMLENYRNLVFLGICLPDLSIISMLKQRREPL

SEQ ID NO: 273 - protein, 80 aa, Homo sapiens
ALTQGPLKFMDVAIEFSQEEWKCLDPAQRTLYRDVMLENYRNLVSLGICLPDLSVTSMLEQKRDPWTLQSEEKIANDPDG

SEQ ID NO: 274 - protein, 80 aa, Homo sapiens
TMFKEAVTFKDVAVVFTEEELGLLDVSQRKLYRDVMLENFRNLLSVGHQLSHRDTFHFQREEKFWIMETATQREGNSGGK

SEQ ID NO: 275 - protein, 80 aa, Homo sapiens
QGTVAFEDVAVNFSQEEWSLLSEVQRCLYHDVMLENWVLISSLGCWCGSEDEEAPSKKSISIQRVSQVSTPGAGVSPKKA

SEQ ID NO: 276 - protein, 80 aa, Homo sapiens
AEAFGDSEEDGEDVFEVEKILDMKTEGGKVLYKVRWKGYTSDDDTWEPEIHLEDCKEVLLEFRKKIAENKAKAVRKDIQR

SEQ ID NO: 277 - protein, 80 aa, Homo sapiens
VLQMQNSEHHGQSIKTQTDSISLEDVAVNFTLEEWALLDPGQRNIYRDVMRATFKNLACIGEKWKDQDIEDEHKNQGRNL

SEQ ID NO: 278 - protein, 80 aa, Homo sapiens
AMALTDPAQVSVTFDDVAVTFTQEEWGQLDLAQRTLYQEVMLENCGLLVSLGCPVPRPELIYHLEHGQEPWTRKEDLSQG

SEQ ID NO: 279 - protein, 80 aa, Homo sapiens
VHGSVTFRDVAIDFSQEEWECLQPDQRTLYRDVMLENYSHLISLGSSISKPDVITLLEQEKEPWIVVSKETSRWYPDLES

SEQ ID NO: 280 - protein, 80 aa, Homo sapiens
DPVACEDVAVNFTQEEWALLDISQRKLYREVMLETFRNLTSIGKKWKDQNIEYEYQNPRRNFRSLIEGNVNEIKEDSHCG

SEQ ID NO: 281 - protein, 80 aa, Homo sapiens
IKFQERVTFKDVAVVFTKEELALLDKAQINLYQDVMLENFRNLMLVRDGIKNNILNLQAKGLSYLSQEVLHCWQIWKQRI

SEQ ID NO: 282 - protein, 80 aa, Homo sapiens
GPLTFRDVAIEFSLKEWQCLDTAQRNLYRNVMLENYRNLVFLGITVSKPDLITCLEQGKEAWSMKRHEIMVAKPTVMCSH

SEQ ID NO: 283 - protein, 80 aa, Homo sapiens
TMSKEAVTFKDVAVVFTEEELGLLDLAQRKLYRDVMLENFRNLLSVGHQPFHRDTFHFLREEKFWMMDIATQREGNSGGK

SEQ ID NO: 284 - protein, 80 aa, Homo sapiens
GPLEFRDVAIEFSLEEWHCLDTAQQNLYRDVMLENYRHLVFLGIVVTKPDLITCLEQGKKPFTVKRHEMIAKSPVMCFHF

SEQ ID NO: 285 - protein, 80 aa, Homo sapiens
GHTEGGELVNELLKSWLKGLVTFEDVAVEFTQEEWALLDPAQRTLYRDVMLENCRNLASLGNQVDKPRLISQLEQEDKVM

SEQ ID NO: 286 - protein, 80 aa, Homo sapiens
AEPASVTVTFDDVALYFSEQEWEILEKWQKQMYKQEMKTNYETLDSLGYAFSKPDLITWMEQGRMLLISEQGCLDKTRRT

SEQ ID NO: 287 - protein, 80 aa, Homo sapiens
HSQASAISQDREEKIMSQEPLSFKDVAVVFTEEELELLDSTQRQLYQDVMQENFRNLLSVGERNPLGDKNGKDTEYIQDE

SEQ ID NO: 288 - protein, 80 aa, Homo sapiens
GSLEEGRRATGLPAAQVQEPVTFKDVAVDFTQEEWGQLDLVQRTLYRDVMLETYGHLLSVGNQIAKPEVISLLEQGEEPW

SEQ ID NO: 289 - protein, 80 aa, Homo sapiens
TTFKEAVTFKDVAVVFTEEELGLLDPAQRKLYRDVMLENFRNLLSVGHQPFHQDTCHFLREEKFWMMGTATQREGNSGGK

SEQ ID NO: 290 - protein, 80 aa, Homo sapiens
AKLYEAVTFKDVAVIFTEEELGLLDPAQRKLYRDVMLENFRNLLSVGGKIQTEMETVPEAGTHEEFSCKQIWEQIASDLT

SEQ ID NO: 291 - protein, 80 aa, Homo sapiens
RSDLFLPDSQTNEERKQYDSVAFEDVAVNFTQEEWALLGPSQKSLYRDVMWETIRNLDCIGMKWEDTNIEDQHRNPRRSL

SEQ ID NO: 292 - protein, 80 aa, Homo sapiens
PGTPGSLEMGLLTFRDVAIEFSPEEWQCLDTAQQNLYRNVMLENYRNLAFLGIALSKPDLITYLEQGKEPWNMKQHEMVD

SEQ ID NO: 293 - protein, 80 aa, Homo sapiens
TPGVRVSTDPEQVTFEDVVVGFSQEEWGQLKPAQRTLYRDVMLDTFRLLVSVGHWLPKPNVISLLEQEAELWAVESRLPQ

SEQ ID NO: 294 - protein, 80 aa, Homo sapiens
EQTQAAGMVAGWLINCYQDAVTFDDVAVDFTQEEWTLLDPSQRDLYRDVMLENYENLASVEWRLKTKGPALRQDRSWFRA

SEQ ID NO: 295 - protein, 80 aa, Homo sapiens
PSEANSIQSANATTKTSETNHTSRPRLKNVDRSTAQQLAVTVGNVTVIITDFKEKTRSSSTSSSTVTSSAGSEQQNQSSS

SEQ ID NO: 296 - protein, 80 aa, Homo sapiens
ALTQGQLSFSDVAIEFSQEEWKCLDPGQKALYRDVMLENYRNLVSLGEDNVRPEACICSGICLPDLSVTSMLEQKRDPWT

SEQ ID NO: 297 - protein, 80 aa, Homo sapiens
AAAAALRAPAQSSVTFEDVAVNFSLEEWSLLNEAQRCLYRDVMLETLTLISSLGCWHGGEDEAAPSKQSTCIHIYKDQGG

SEQ ID NO: 298 - protein, 80 aa, Homo sapiens
AQGSVSFNDVTVDFTQEEWQHLDHAQKTLYMDVMLENYCHLISVGCHMTKPDVILKLERGEEPWTSFAGHTCLEENWKAE

SEQ ID NO: 299 - protein, 80 aa, Homo sapiens
DPVAFKDVAVNFTQEEWALLDISQRKLYREVMLETFRNLTSLGKRWKDQNIEYEHQNPRRNFRSLIEEKVNEIKDDSHCG

SEQ ID NO: 300 - protein, 80 aa, Homo sapiens
SKDLVTFGDVAVNFSQEEWEWLNPAQRNLYRKVMLENYRSLVSLGVSVSKPDVISLLEQGKEPWMVKKEGTRGPCPDWEY

SEQ ID NO: 301 - protein, 80 aa, Homo sapiens
DSVAFEDVAINFTCEEWALLGPSQKSLYRDVMQETIRNLDCIGMIWQNHDIEEDQYKDLRRNLRCHMVERACEIKDNSQC

SEQ ID NO: 302 - protein, 80 aa, Homo sapiens
GPLTFMDVAIEFCLEEWQCLDIAQQNLYRNVMLENYRNLVFLGIAVSKPDLITCLEQEKEPWEPMRRHEMVAKPPVMCSH

SEQ ID NO: 303 - protein, 80 aa, Homo sapiens
QSNDIARGFERGLEPEKIIGATDSCGDLMFLMKWKDTDEADLVLAKEANVKCPQIVIAFYEERLTWHAYPEDAENKEKET

SEQ ID NO: 304 - protein, 80 aa, Homo sapiens
ALPAKDSAWPWEEKPRYLGPVTFEDVAVLFTEAEWKRLSLEQRNLYKEVMLENLRNLVSLAESKPEVHTCPSCPLAFGSQ

SEQ ID NO: 305 - protein, 80 aa, Homo sapiens
DAKSLTAWSRTLVTFKDVFVDFTREEWKLLDTAQQIVYRNVMLENYKNLVSLGYQLTKPDVILRLEKGEEPWLVEREIHQ

SEQ ID NO: 306 - protein, 80 aa, Homo sapiens
DAVAFEDVAVNFTQEEWALLGPSQKNLYRYVMQETIRNLDCIRMIWEEQNTEDQYKNPRRNLRCHMVERFSESKDSSQCG

SEQ ID NO: 307 - protein, 80 aa, Homo sapiens
EKTKVERMVEDYLASGYQDSVTFDDVAVDFTPEEWALLDTTEKYLYRDVMLENYMNLASVEWEIQPRTKRSSLQQGFLKN

SEQ ID NO: 308 - protein, 80 aa, Homo sapiens
DSVAFEDVDVNFTQEEWALLDPSQKNLYRDVMWETMRNLASIGKKWKDQNIKDHYKHRGRNLRSHMLERLYQTKDGSQRG

SEQ ID NO: 309 - protein, 80 aa, Homo sapiens
IESQEPVTFEDVAVDFTQEEWQQLNPAQKTLHRDVMLETYNHLVSVGCSGIKPDVIFKLEHGKDPWIIESELSRWIYPDR

SEQ ID NO: 310 - protein, 80 aa, Homo sapiens
AVGLCKAMSQGLVTFRDVALDFSQEEWEWLKPSQKDLYRDVMLENYRNLVWLGLSISKPNMISLLEQGKEPWMVERKMSQ

SEQ ID NO: 311 - protein, 80 aa, Homo sapiens
DKVEEEAMAPGLPTACSQEPVTFADVAVVFTPEEWVFLDSTQRSLYRDVMLENYRNLASVADQLCKPNALSYLEERGEQW

SEQ ID NO: 312 - protein, 80 aa, Homo sapiens
TFEDVAVYFSQEEWGLLDTAQRALYRHVMLENFTLVTSLGLSTSRPRVVIQLERGEEPWVPSGKDMTLARNTYGRLNSGS

SEQ ID NO: 313 - protein, 80 aa, Homo sapiens
AEPPRLPLTFEDVAIYFSEQEWQDLEAWQKELYKHVMRSNYETLVSLDDGLPKPELISWIEHGGEPFRKWRESQKSGNII

SEQ ID NO: 314 - protein, 80 aa, Homo sapiens
DSVVFEDVAVNFTQEEWALLGPSQKKLYRDVMQETFVNLASIGENWEEKNIEDHKNQGRKLRSHMVERLCERKEGSQFGE

SEQ ID NO: 315 - protein, 80 aa, Homo sapiens
AAAALRDPAQGCVTFEDVTIYFSQEEWVLLDEAQRLLYCDVMLENFALIASLGLISFRSHIVSQLEMGKEPWVPDSVDMT

SEQ ID NO: 316 - protein, 80 aa, Homo sapiens
AAPALALVSFEDVVVTFTGEEWGHLDLAQRTLYQEVMLETCRLLVSLGHPVPKPELIYLLEHGQELWTVKRGLSQSTCAG

SEQ ID NO: 317 - protein, 80 aa, Homo sapiens
IKSQESLTLEDVAVEFTWEEWQLLGPAQKDLYRDVMLENYSNLVSVGYQASKPDALFKLEQGEPWTVENEIHSQICPEIK

SEQ ID NO: 318 - protein, 80 aa, Homo sapiens
GESLESRVTLGSLTAESQELLTFKDVSVDFTQEEWGQLAPAHRNLYREVMLENYGNLVSVGCQLSKPGVISQLEKGEEPW

SEQ ID NO: 319 - protein, 80 aa, Homo sapiens
ASVALEDVAVNFTREEWALLGPCQKNLYKDVMQETIRNLDCVGMKWKDQNIEDQYRYPRKNLRCRMLERFVESKDGTQCG

SEQ ID NO: 320 - protein, 80 aa, Homo sapiens
TESQGTVTFKDVAIDFTQEEWKRLDPAQRKLYRNVMLENYNNLITVGYPFTKPDVIFKLEQEEEPWVMEEEVLRRHWQGE

SEQ ID NO: 321 - protein, 80 aa, Homo sapiens
DSVASEDVAVNFTLEEWALLDPSQKKLYRDVMRETFRNLACVGKKWEDQSIEDWYKNQGRILRNHMEEGLSESKEYDQCG

SEQ ID NO: 322 - protein, 80 aa, Homo sapiens
EETQGELTSSCGSKTMANVSLAFRDVSIDLSQEEWECLDAVQRDLYKDVMLENYSNLVSLGYTIPKPDVITLLEQEKEPW

SEQ ID NO: 323 - protein, 80 aa, Homo sapiens
AAILLTTRPKVPVSFEDVSVYFTKTEWKLLDLRQKVLYKRVMLENYSHLVSLGFSFSKPHLISQLERGEGPWVADIPRTW

SEQ ID NO: 324 - protein, 80 aa, Homo sapiens
KDKVEKEKSEKETTSKKNSHKKTRPRLKNVDRSSAQHLEVTVGDLTVIITDFKEKTKSPPASSAASADQHSQSGSSSDNT

SEQ ID NO: 325 - protein, 80 aa, Homo sapiens
GPLTFTDVAIKFSLEEWQFLDTAQQNLYRDVMLENYRNLVFLGVGVSKPDLITCLEQGKEPWNMKRHKMVAKPPVVCSHF

SEQ ID NO: 326 - protein, 80 aa, Homo sapiens
RKPNPQAMAALFLSAPPQAEVTFEDVAVYLSREEWGRLGPAQRGLYRDVMLETYGNLVSLGVGPAGPKPGVISQLERGDE

SEQ ID NO: 327 - protein, 80 aa, Homo sapiens
LSLSPILLYTCEMFQDPVAFKDVAVNFTQEEWALLDISQKNLYREVMLETFWNLTSIGKKWKDQNIEYEYQNPRRNFRSV

SEQ ID NO: 328 - protein, 80 aa, Homo sapiens
AAGEPRSLLFFQKPVTFEDVAVNFTQEEWDCLDASQRVLYQDVMSETFKNLTSVARIFLHKPELITKLEQEEEQWRETRV

SEQ ID NO: 329 - protein, 80 aa, Homo sapiens
AAMPLKAQYQEMVTFEDVAVHFTKTEWTGLSPAQRALYRSVMLENFGNLTALGYPVPKPALISLLERGDMAWGLEAQDDP

SEQ ID NO: 330 - protein, 80 aa, Homo sapiens
ARVPLTFSDVAIDFSQEEWEYLNSDQRDLYRDVMLENYTNLVSLDFNFTTESNKLSSEKRNYEVNAYHQETWKRNKTFNL

SEQ ID NO: 331 - protein, 80 aa, Homo sapiens
ASRLPTAWSCEPVTFEDVTLGFTPEEWGLLDLKQKSLYREVMLENYRNLVSVEHQLSKPDVVSQLEEAEDFWPVERGIPQ

SEQ ID NO: 332 - protein, 80 aa, Homo sapiens
SKKKRDAADKPRGFARGLDPERIIGATDSSGELMFLMKWKDSDEADLVLAKEANMKCPQIVIAFYEERLTWHSCPEDEAQ

SEQ ID NO: 333 - protein, 80 aa, Homo sapiens
AHKYVGLQYHGSVTFEDVAIAFSQQEWESLDSSQRGLYRDVMLENYRNLVSMGHSRSKPHVIALLEQWKEPEVTVRKDGR

SEQ ID NO: 334 - protein, 80 aa, Homo sapiens
AAARLLPVPAGPQPLSFQAKLTFEDVAVLLSQDEWDRLCPAQRGLYRNVMMETYGNVVSLGLPGSKPDIISQLERGEDPW

SEQ ID NO: 335 - protein, 80 aa, Homo sapiens
AVGLLKAMYQELVTFRDVAVDFSQEEWDCLDSSQRHLYSNVMLENYRILVSLGLCFSKPSVILLLEQGKAPWMVKRELTK

SEQ ID NO: 336 - protein, 80 aa, Homo sapiens
GLLTFRDVAIEFSLEEWQCLDTAQRNLYKNVILENYRNLVFLGIAVSKQDLITCLEQEKEPLTVKRHEMVNEPPVMCSHF

SEQ ID NO: 337 - protein, 80 aa, Homo sapiens
GLLAFRDVALEFSPEEWECLDPAQRSLYRDVMLENYRNLISLGEDSFNMQFLFHSLAMSKPELIICLEARKEPWNVNTEK

SEQ ID NO: 338 - protein, 80 aa, Homo sapiens
NLTEGRVVFEDVAIYFSQEEWGHLDEAQRLLYRDVMLENLALLSSLGSWHGAEDEEAPSQQGFSVGVSEVTASKPCLSSQ

SEQ ID NO: 339 - protein, 80 aa, Homo sapiens
GPAQHTSWPCGSAVPTLKSMVTFEDVAVYFSQEEWELLDAAQRHLYHSVMLENLELVTSLGSWHGVEGEGAHPKQNVSVE

SEQ ID NO: 340 - protein, 80 aa, Homo sapiens
SGYPGAERNLLEYSYFEKGPLTFRDVVIEFSQEEWQCLDTAQQDLYRKVMLENFRNLVFLGIDVSKPDLITCLEQGKDPW

SEQ ID NO: 341 - protein, 80 aa, Homo sapiens
ARKLVMFRDVAIDFSQEEWECLDSAQRDLYRDVMLENYSNLVSLDLPSRCASKDLSPEKNTYETELSQWEMSDRLENCDL

SEQ ID NO: 342 - protein, 80 aa, Homo sapiens
GPLQFRDVAIEFSLEEWHCLDTAQRNLYRNVMLENYSNLVFLGITVSKPDLITCLEQGRKPLTMKRNEMIAKPSVMCSHF

SEQ ID NO: 343 - protein, 80 aa, Homo sapiens
VAGWLTNYSQDSVTFEDVAVDFTQEEWTLLDQTQRNLYRDVMLENYKNLVAVDWESHINTKWSAPQQNFLQGKTSSVVEM

SEQ ID NO: 344 - protein, 80 aa, Homo sapiens
AAAWMAPAQESVTFEDVAVTFTQEEWGQLDVTQRALYVEVMLETCGLLVALGDSTKPETVEPIPSHLALPEEVSLQEQLA

SEQ ID NO: 345 - protein, 80 aa, Homo sapiens
VLEWLFISQEQPKITKSWGPLSFMDVFVDFTWEEWQLLDPAQKCLYRSVMLENYSNLVSLGYQHTKPDIIFKLEQGEELC

SEQ ID NO: 346 - protein, 80 aa, Homo sapiens
AAAVLMDRVQSCVTFEDVFVYFSREEWELLEEAQRFLYRDVMLENFALVATLGFWCEAEHEAPSEQSVSVEGVSQVRTAE

SEQ ID NO: 347 - protein, 80 aa, Homo sapiens
AGSQFPDFKHLGTFLVFEELVTFEDVLVDFSPEELSSLSAAQRNLYREVMLENYRNLVSLGHQFSKPDIISRLEEEESYA

SEQ ID NO: 348 - protein, 80 aa, Homo sapiens
IQSQISFEDVAVDFTLEEWQLLNPTQKNLYRDVMLENYSNLVFLEVWLDNPKMWLRDNQDNLKSMERGHKYDVFGKIFNS

SEQ ID NO: 349 - protein, 80 aa, Homo sapiens
DLVAFEDVAVNFTQEEWSLLDPSQKNLYREVMQETLRNLASIGEKWKDQNIEDQYKNPRNNLRSLLGERVDENTEENHCG

SEQ ID NO: 350 - protein, 80 aa, Homo sapiens
KDEDIKLRVIGQDSSEIHFKVKMTTPLKKLKKSYCQRQGVPVNSLRFLFEGQRIADNHTPEELGMEEEDVIEVYQEQIGG

SEQ ID NO: 351 - protein, 80 aa, Homo sapiens
DSVAFEDVAVNFTQEEWALLSPSQKNLYRDVTLETFRNLASVGIQWKDQDIENLYQNLGIKLRSLVERLCGRKEGNEHRE

SEQ ID NO: 352 - protein, 80 aa, Homo sapiens
RNFWILRLPPGSKGEAPKVPVTFDDVAVYFSELEWGKLEDWQKELYKHVMRGNYETLVSLDYAISKPDILTRIERGEEPC

SEQ ID NO: 353 - protein, 80 aa, Homo sapiens
AAAAPRRPTQQGTVTFEDVAVNFSQEEWCLLSEAQRCLYRDVMLENLALISSLGCWCGSKDEEAPCKQRISVQRESQSRT

SEQ ID NO: 354 - protein, 80 aa, Homo sapiens
SGEDSGSFYSWQKAKREQGLVTFEDVAVDFTQEEWQYLNPPQRTLYRDVMLETYSNLVFVGQQVTKPNLILKLEVEECPA

SEQ ID NO: 355 - protein, 80 aa, Homo sapiens
DSVAFEDVAVNFTQEEWALLGPSQKSLYRNVMQETIRNLDCIEMKWEDQNIGDQCQNAKRNLRSHTCEIKDDSQCGETFG

SEQ ID NO: 356 - protein, 80 aa, Homo sapiens
AAGWLTTWSQNSVTFQEVAVDFSQEEWALLDPAQKNLYKDVMLENFRNLASVGYQLCRHSLISKVDQEQLKTDERGILQG

SEQ ID NO: 357 - protein, 80 aa, Homo sapiens
ENPRNQLMALMLLTAQPQELVMFEEVSVCFTSEEWACLGPIQRALYWDVMLENYGNVTSLEWETMTENEEVTSKPSSSQR

SEQ ID NO: 358 - protein, 80 aa, Homo sapiens
LETYNSLVSLQELVSFEEVAVHFTWEEWQDLDDAQRTLYRDVMLETYSSLVSLGHCITKPEMIFKLEQGAEPWIVEETPN

SEQ ID NO: 359 - protein, 80 aa, Homo sapiens
RHFRRPEPCREPLASPIQDSVAFEDVAVNFTQEEWALLDSSQKNLYREVMQETCRNLASVGSQWKDQNIEDHFEKPGKDI

SEQ ID NO: 360 - protein, 80 aa, Homo sapiens
AAAELTAPAQGIVTFEDVAVYFSWKEWGLLDEAQKCLYHDVMLENLTLTTSLGGSGAGDEEAPYQQSTSPQRVSQVRIPK

SEQ ID NO: 361 - protein, 80 aa, Homo sapiens
AATFQLPGHQEMPLTFQDVAVYFSQAEGRQLGPQQRALYRDVMLENYGNVASLGFPVPKPELISQLEQGKELWVLNLLGA

SEQ ID NO: 362 - protein, 80 aa, Homo sapiens
RSEAGEPPSSLQVKPETPASAAVAVAAAAAPTTTAEKPPAEAQDEPAESLSEFKPFFGNIIITDVTANCLTVTFKEYVTV

SEQ ID NO: 363 - protein, 80 aa, Homo sapiens
HRTTRIKITELNPHLMCALCGGYFIDATTIVECLHSFCKTCIVRYLETNKYCPMCDVQVHKTRPLLSIRSDKTLQDIVYK

SEQ ID NO: 364 - protein, 80 aa, Homo sapiens
ASQEFEVEAIVDKRQDKNGNTQYLVRWKGYDKQDDTWEPEQHLMNCEKCVHDFNRRQTEKQKKLTWTTTSRIFSNNARRR

SEQ ID NO: 365 - protein, 80 aa, Homo sapiens
ASGDLYEVERIVDKRKNKKGKWEYLIRWKGYGSTEDTWEPEHHLLHCEEFIDEFNGLHMSKDKRIKSGKQSSTSKLLRDS

SEQ ID NO: 366 - protein, 80 aa, Homo sapiens
TLIRKADLENHNKDGGFWTVIDGKVYDIKDFQTQSLTGNSILAQFAGEDPVVALEAALQFEDTRESMHAFCVGQYLEPDQ

SEQ ID NO: 367 - protein, 80 aa, Homo sapiens
EKTKIGTMVEDHRSNSYQDSVTFDDVAVEFTPEEWALLDTTQKYLYRDVMLENYMNLASVDFFFCLTSEWEIQPRTKRSS

SEQ ID NO: 368 - protein, 80 aa, Homo sapiens
AHELVMFRDVAIDVSQEEWECLNPAQRNLYKEVMLENYSNLVSLGLSVSKPAVISSLEQGKEPWMVVREETGRWCPGTWK

SEQ ID NO: 369 - protein, 80 aa, Homo sapiens
AFEDVAVYFSQEEWGLLDTAQRALYRRVMLDNFALVASLGLSTSRPRVVIQLERGEEPWVPSGTDTTLSRTTYRRRNPGS

SEQ ID NO: 370 - protein, 80 aa, Homo sapiens
AQLRRGHLTFRDVAIEFSQEEWKCLDPVQKALYRDVMLENYRNLVSLGICLPDLSIISMMKQRTEPWTVENEMKVAKNPD

SEQ ID NO: 371 - protein, 80 aa, Homo sapiens
SDHSLGISRSKTPVDDPMSLLYNMNDCYSKLKELVPSIPQNKKVSKMEILQHVIDYILDLQIALDSHPTIVSLHHQRPGQ

SEQ ID NO: 372 - protein, 80 aa, Homo sapiens
KDPNEPQKPVSAYALFFRDTQAAIKGQNPNATFGEVSKIVASMWDGLGEEQKQVYKKKTEAAKKEYLKQLAAYRASLVSK

SEQ ID NO: 373 - protein, 80 aa, Homo sapiens
QEEKQEDAAICPVTVLPEEPVTFQDVAVDFSREEWGLLGPTQRTEYRDVMLETFGHLVSVGWETTLENKELAPNSDIPEE

SEQ ID NO: 374 - protein, 80 aa, Homo sapiens
DASRLSGRDPSSWTVEDVMQFVREADPQLGPHADLFRKHEIDGKALLLLRSDMMMKYMGLKLGPALKLSYHIDRLKQGKF

SEQ ID NO: 375 - protein, 80 aa, Homo sapiens
AVTFEDVTIIFTWEEWKFLDSSQKRLYREVMWENYTNVMSVENWNESYKSQEEKFRYLEYENFSYWQGWWNAGAQMYENQ

SEQ ID NO: 376 - protein, 80 aa, Homo sapiens
ELSAIGEQVFAVESIRKKRVRKGKVEYLVKWKGWPPKYSTWEPEEHILDPRLVMAYEEKEERDRASGYRKRGPKPKRLLL

SEQ ID NO: 377 - protein, 80 aa, Homo sapiens
GGAGARLPALLDEQQVNVLLYDMNGCYSRLKELVPTLPQNRKVSKVEILQHVIDYIRDLQLELNSESEVGTPGGRGLPVR

SEQ ID NO: 378 - protein, 80 aa, Homo sapiens
VVMAASPGSLHSPQQLAEEATRKRELRLMKNREAAKECRRRKKEYVKCLESRVAVLEVQNKKLIEELETLKDICSPKTDY

SEQ ID NO: 379 - protein, 80 aa, Homo sapiens
GGGPGGRPGREPRQRHTANARERDRTNSVNTAFTALRTLIPTEPADRKLSKIETLRLASSYISHLGNVLLAGEACGDGQP

SEQ ID NO: 380 - protein, 80 aa, Homo sapiens
SGFGYSLPQQQPAAVARRNERERNRVKLVNLGFATLREHVPNGAANKKMSKVETLRSAVEYIRALQQLLDEHDAVSAAFQ

SEQ ID NO: 381 - protein, 80 aa, Homo sapiens
APLPPRDPNGAGPEWREPGAVSFADVAVYFCREEWGCLRPAQRALYRDVMRETYGHLSALGIGGNKPALISWVEEEAELW

SEQ ID NO: 382 - protein, 80 aa, Homo sapiens
KQGFSKDPSTWSVDEVIQFMKHTDPQISGPLADLFRQHEIDGKALFLLKSDVMMKYMGLKLGPALKLCYYIEKLKEGKYS

SEQ ID NO: 383 - protein, 80 aa, Homo sapiens
SGGGSPQSYEELQTQRVMANVRERQRTQSLNEAFAALRKIIPTLPSDKLSKIQTLKLAARYIDFLYQVLQSDELDSKMAS

SEQ ID NO: 384 - protein, 80 aa, Homo sapiens
IAPGVVMASSPALPTQPAEEAARKREVRLMKNREAARECRRKKKEYVKCLENRVAVLENQNKTLIEELKALKDLYCHKSD

SEQ ID NO: 385 - protein, 80 aa, Homo sapiens
SRIPVSKSQPVTPEKHRARKRQAWLWEEDKNLRSGVRKYGEGNWSKILLHYKFNNRTSVMLKDRWRTMKKLKLISSDSED

SEQ ID NO: 386 - protein, 80 aa, Homo sapiens
SLAIARGRGKGPAAEEPLSLLDDMNHCYSRLRELVPGVPRGTQLSQVEILQRVIDYILDLQVVLAEPAPGPPDGPHLPIQ

SEQ ID NO: 387 - protein, 80 aa, Homo sapiens
GSGPPSSGGGLYRDMGAQGGRPSLIARIPVARILGDPEEESWSPSLTNLEKVVVTDVTSNFLTVTIKESNTDQGFFKEKR

SEQ ID NO: 388 - protein, 80 aa, Homo sapiens
ELPAVGEHVFAVESIEKKRIRKGRVEYLVKWRGWSPKYNTWEPEENILDPRLLIAFQNRERQEQLMGYRKRGPKPKPLVV

SEQ ID NO: 389 - protein, 80 aa, Homo sapiens
VDSSSNQLPSSKRMRTAFTSTQLLELEREFASNMYLSRLRRIEIATYLNLSEKQVKIWFQNRRVKHKKEGKGSNHRGGGG

SEQ ID NO: 390 - protein, 80 aa, Homo sapiens
TPGGGGDAGKKRKRRVLFSKAQTYELERRFRQQRYLSAPEREHLASLIRLTPTQVKIWFQNHRYKMKRARAEKGMEVTPL

SEQ ID NO: 391 - protein, 80 aa, Homo sapiens
QTVVMTSPVTLTSQTTKTDDPQLKREIRLMKNREAARECRRKKKEYVKCLENRVAVLENQNKTLIEELKTLKDLYSNKSV

SEQ ID NO: 392 - protein, 80 aa, Homo sapiens
KGSPSAQSFEELQSQRILANVRERQRTQSLNEAFAALRKIIPTLPSDKLSKIQTLKLAARYIDFLYQVLQSDEMDNKMTS

SEQ ID NO: 393 - protein, 80 aa, Homo sapiens
NLTEDYMVFEDVAIHFSQEEWGILNDVQRHLHSDVMLENFALLSSVGCWHGAKDEEAPSKQCVSVGVSQVTTLKPALSTQ

SEQ ID NO: 394 - protein, 80 aa, Homo sapiens
KDPNEPQKPVSAYALFFRDTQAAIKGQNPNATFGEVSKIVASMWDSLGEEQKQVYKRKTEAAKKEYLKALAAYRASLVSK

SEQ ID NO: 395 - protein, 80 aa, Homo sapiens
KDPNEPQKPVSAYALFFRDTQAAIKGQNPNATFGEVSKIVASMWDSLGEEQKQVYKRKTEAAKKEYLKALAAYKDNQECQ

SEQ ID NO: 396 - protein, 80 aa, Homo sapiens
LDGSTWDFCSEDCKSKYLLWYCKAARCHACKRQGKLLETIHWRGQIRHFCNQQCLLRFYSQQNQPNLDTQSGPESLLNSQ

SEQ ID NO: 397 - protein, 80 aa, Homo sapiens
ASVQASRRQWCYLCDLPKMPWAMVWDFSEAVCRGCVNFEGADRIELLIDAARQLKRSHVLPEGRSPGPPALKHPATKDLA

SEQ ID NO: 398 - protein, 80 aa, Homo sapiens
MEGPQPENMQPRTRRTKFTLLQVEELESVFRHTQYPDVPTRRELAENLGVTEDKVRVWFKNKRARCRRHQRELMLANELR

SEQ ID NO: 399 - protein, 80 aa, Homo sapiens
PKIMPKKPAEEGNDSEEVPEASGPQNDGKELCPPGKPTTSEKIHERSGPKRGEHAWTHRLRERKQLVIYEEISDPEEDDE

SEQ ID NO: 400 - protein, 80 aa, Homo sapiens
SAAQVSSSRRQSCYLCDLPRMPWAMIWDFSEPVCRGCVNYEGADRIEFVIETARQLKRAHGCFQDGRSPGPPPPVGVKTV

SEQ ID NO: 401 - protein, 80 aa, Homo sapiens
PGPPGSLEMGPLTFRDVAIEFSLEEWQCLDTAQRNLYRKVMFENYRNLVFLGIAVSKPHLITCLEQGKEPWNRKRQEMVA

SEQ ID NO: 402 - protein, 80 aa, Homo sapiens
NKKKVEEVLEEEEEEYVVEKVLDRRVVKGKVEYLLKWKGFSDEDNTWEPEENLDCPDLIAEFLQSQKTAHETDKSEGGKR

SEQ ID NO: 403 - protein, 80 aa, Homo sapiens
LANVVEKVRLLRLHPGMGLKGDLCERHGEKLKMFCKEDVLIMCEACSQSPEHEAHSVVPMEDVAWEYKWELHEALEHLKK

SEQ ID NO: 404 - protein, 80 aa, Homo sapiens [sequence omitted]

SEQ ID NO: 405 - protein, 80 aa, Homo sapiens
ENSDLLPVAQTEPSIWTVDDVWAFIHSLPGCQDIADEFRAQEIDGQALLLLKEDHLMSAMNIKLGPALKICARINSLKES

SEQ ID NO: 406 - protein, 80 aa, Homo sapiens
AGPGGGSRSGSGRPAAANAARERSRVQTLRHAFLELQRTLPSVPPDTKLSKLDVLLLATTYIAHLTRSLQDDAEAPADAG

SEQ ID NO: 407 - protein, 80 aa, Homo sapiens
QNGKSKKVEEAEPEEFVVEKVLDRRVVNGKVEYFLKWKGFTDADNTWEPEENLDCPELIEAFLNSQKAGKEKDGTKRKSL

SEQ ID NO: 408 - protein, 80 aa, Homo sapiens
QHPPDACAFRRGRKKRIPYSKGQLRELEREYAANKFITKDKRRKISAATSLSERQITIWFQNRRVKEKKVLAKVKNSATP

SEQ ID NO: 409 - protein, 80 aa, Homo sapiens
SMSPTTSSQILARKRRRGIIEKRRRDRINNSLSELRRLVPSAFEKQGSAKLEKAEILQMTVDHLKMLHTAGGKGYFDAHA

SEQ ID NO: 410 - protein, 80 aa, Homo sapiens
LVGMGHHFLPSEPTKWNVEDVYEFIRSLPGCQEIAEEFRAQEIDGQALLLLKEDHLMSAMNIKLGPALKIYARISMLKDS

SEQ ID NO: 411 - protein, 80 aa, Homo sapiens
PANEDAPQPGEHGSACEVSVSFEDVTVDFSREEWQQLDSTQRRLYQDVMLENYSHLLSVGFEVPKPEVIFKLEQGEGPWT

SEQ ID NO: 412 - protein, 80 aa, Homo sapiens
GYSSTENLQLVLERRRVANAKERERIKNLNRGFARLKALVPFLPQSRKPSKVDILKGATEYIQVLSDLLEGAKDSKKQDP

SEQ ID NO: 413 - protein, 80 aa, Homo sapiens
EEAPAPEDVTKWTVDDVCSFVGGLSGCGEYTRVFREQGIDGETLPLLTEEHLLTNMGLKLGPALKIRAQVARRLGRVFYV

SEQ ID NO: 414 - protein, 80 aa, Homo sapiens
GGTLAHTPRRSLPSHHGKKMRMARCGHCRGCLRVQDCGSCVNCLDKPKFGGPNTKKQCCVYRKCDKIEARKMERLAKKGR

SEQ ID NO: 415 - protein, 80 aa, Homo sapiens
LNSPTTTSQIMARKKRRGIIEKRRRDRINNSLSELRRLVPTAFEKQGSAKLEKAEILQMTVDHLKMLQATGGKGYFDAHA

SEQ ID NO: 416 - protein, 80 aa, Homo sapiens
QPVKSELDEEEERRKRRREKNKVAAARCRNKKKERTEFLQRESERLELMNAELKTQIEELKQERQQLILMLNRHRPTCIV

SEQ ID NO: 417 - protein, 80 aa, Homo sapiens
LQPEVSSYRRGRKKRVPYTKVQLKELEKEYAASKFITKEKRRRISATTNLSERQVTIWFQNRRVKEKKVVSKSKAPHLHS

SEQ ID NO: 418 - protein, 80 aa, Homo sapiens
LPVPLDSAFEPAFLRKRNERERQRVRCVNEGYARLRDHLPRELADKRLSKVETLRAAIDYIKHLQELLERQAWGLEGAAG

SEQ ID NO: 419 - protein, 80 aa, Homo sapiens
SPFLQRPLHKRKGGQVRFSNDQTIELEKKFETQKYLSPPERKRLAKMLQLSERQVKTWFQNRRAKWRRLKQENPQSNKKE

SEQ ID NO: 420 - protein, 80 aa, Homo sapiens
IAIATGSLHCVCCTEDGEVYTWGDNDEGQLGDGTTNAIQRPRLVAALQGKKVNRVACGSAHTLAWSTSKPASAGKLPAQV

SEQ ID NO: 421 - protein, 80 aa, Homo sapiens
GGSDASQVPNGKRMRTAFTSTQLLELEREFSSNMYLSRLRRIEIATYLNLSEKQVKIWFQNRRVKHKKEGKGTQRNSHAG

SEQ ID NO: 422 - protein, 80 aa, Homo sapiens
RLDLPPGFMFKVQAQHDYTATDTDELQLKAGDVVLVIPFQNPEEQDEGWLMGVKESDWNQHKELEKCRGVFPENFTERVP

SEQ ID NO: 423 - protein, 80 aa, Homo sapiens
GICKLPGRLRIQPALWSREDVLHWLRWAEQEYSLPCTAEHGFEMNGRALCILTKDDFRHRAPSSGDVLYELLQYIKTQRR

SEQ ID NO: 424 - protein, 80 aa, Homo sapiens
PNYRGCEYSYGPAFTRKRNERERQRVKCVNEGYAQLRHHLPEEYLEKRLSKVETLRAAIKYINYLQSLLYPDKAETKNNP

SEQ ID NO: 425 - protein, 80 aa, Homo sapiens
LHGINPVFLSSNPSRWSVEEVYEFIASLQGCQEIAEEFRSQEIDGQALLLLKEEHLMSAMNIKLGPALKICAKINVLKET

SEQ ID NO: 426 - protein, 80 aa, Homo sapiens
QAGQQQGQQKQKRHRTRFTPAQLNELERSFAKTHYPDIFMREELALRIGLTESRVQVWFQNRRAKWKKRKKTTNVFRAPG

SEQ ID NO: 427 - protein, 80 aa, Homo sapiens
AAAVAVAAASRRQSCYLCDLPRMPWAMIWDFTEPVCRGCVNYEGADRVEFVIETARQLKRAHGCFPEGRSPPGAAASAAA

SEQ ID NO: 428 - protein, 80 aa, Homo sapiens
FSSQTPASIKEEEGSPEKERPPEAEYINSRCVLFTYFQGDISSVVDEHFSRALSQPSSYSPSCTSSKAPRSSGPWRDCSF

SEQ ID NO: 429 - protein, 80 aa, Homo sapiens
DKAGGSSGQRTRKKRCPYTKYQIRELEREFFFSVYINKEKRLQLSRMLNLTDRQVKIWFQNRRMKEKKINRDRLQYYSAN

SEQ ID NO: 430 - protein, 80 aa, Homo sapiens
GAPLSGLQGLPECTRCGHGIVGTIVKARDKLYHPECFMCSDCGLNLKQRGYFFLDERLYCESHAKARVKPPEGYDVVAVY

SEQ ID NO: 431 - protein, 80 aa, Homo sapiens
RRPATAETGGGAAAVARRNERERNRVKLVNLGFQALRQHVPHGGASKKLSKVETLRSAVEYIRALQRLLAEHDAVRNALA

SEQ ID NO: 432 - protein, 80 aa, Homo sapiens
TVQVTGKTRTKEKYRVVYTDHQRLELEKEFHCNRYITIQRKSELAVNLGLSERQVKIWFQNRRAKERKMIKKKISQFENS

SEQ ID NO: 433 - protein, 80 aa, Homo sapiens
EEAAQKRKEKEPGMALPQGHLTFRDVAIEFSLEEWKCLDPTQRALYRAMMLENYRNLHSVDISSKCMMKKFSSTAQGNTE

SEQ ID NO: 434 - protein, 80 aa, Homo sapiens
DIRASQVARWTVDEVAEFVQSLLGCEEHAKCFKKEQIDGKAFLLLTQTDIVKVMKIKLGPALKIYNSILMFRHSQELPEE

SEQ ID NO: 435 - protein, 80 aa, Homo sapiens
LSPLEGTKMTVNNLHPRVTEEDIVELFCVCGALKRARLVHPGVAEVVFVKKDDAITAYKKYNNRCLDGQPMKCNLHMNGN

SEQ ID NO: 436 - protein, 80 aa, Homo sapiens
DNAERPRARRRRKPRVLFSQAQVYELERRFKQQRYLSAPERDQLASVLKLTSTQVKIWFQNRRYKCKRQRQDQTLELVGL

SEQ ID NO: 437 - protein, 80 aa, Homo sapiens
SQVKSKAKKTVDKHSDEYKIRRERNNIAVRKSRDKAKMRNLETQHKVLELTAENERLQKKVEQLSRELSTLRNLFKQLPE

SEQ ID NO: 438 - protein, 80 aa, Homo sapiens
KRDYIRLYGIKCAKCSIGFSKNDFVMRARSKVYHIECFRCVACSRQLIPGDEFALREDGLFCRADHDVVERASLGAGDPL

SEQ ID NO: 439 - protein, 80 aa, Homo sapiens
SLGSQVKTRTKDKYRVVYTDHQRLELEKEFHYSRYITIRRKAELAATLGLSERQVKIWFQNRRAKERKINKKKLQQQQQQ

SEQ ID NO: 440 - protein, 80 aa, Homo sapiens
QGGQRGRPHSRRRHRTTFSPVQLEQLESAFGRNQYPDIWARESLARDTGLSEARIQVWFQNRRAKQRKQERSLLQPLAHL

SEQ ID NO: 441 - protein, 80 aa, Homo sapiens
DALTYLDQVKIRFGSDPATYNGFLEIMKEFKSQSIDTPGVIRRVSQLFHEHPDLIVGFNAFLPLGYRIDIPKNGKLNIQS

SEQ ID NO: 442 - protein, 80 aa, Homo sapiens
RLHLDSNPLKWSVADVVRFIRSTDCAPLARIFLDQEIDGQALLLLTLPTVQECMDLKLGPAIKLCHHIERIKFAFYEQFA

SEQ ID NO: 443 - protein, 80 aa, Homo sapiens
AKGAAPNAPRTRKKRCPYSKFQIRELEREFFFNVYINKEKRLQLSRMLNLTDRQVKIWFQNRRMKEKKLSRDRLQYFSGN

SEQ ID NO: 444 - protein, 80 aa, Homo sapiens
TTGNWLTAKSGRKKRCPYTKHQTLELEKEFLFNMYLTRERRLEISKTINLTDRQVKIWFQNRRMKLKKMNRENRIRELTS

SEQ ID NO: 445 - protein, 80 aa, Homo sapiens
YLVSNVIELLDVDPNDQEEDGANIDLDSQRKGKCAVIKTSTRQTYFLPVIGLVDAEKLKPGDLVGVNKDSYLILETLPTE

SEQ ID NO: 446 - protein, 80 aa, Homo sapiens
KASPTLGKRKKRRHRTVFTAHQLEELEKAFSEAHYPDVYAREMLAVKTELPEDRIQVWFQNRRAKWRKREKRWGGSSVMA

SEQ ID NO: 447 - protein, 80 aa, Homo sapiens
EESERPKPRSRRKPRVLFSQAQVFELERRFKQQRYLSAPEREHLASSLKLTSTQVKIWFQNRRYKCKRQRQDKSLELGAH

SEQ ID NO: 448 - protein, 80 aa, Homo sapiens
VVPGSRQEEVIDHKLTEREWAEEWKHLNNLLNCIMDMVEKTRRSLTVLRRCQEADREELNHWARRYSDAEDTKKGPAPAA

SEQ ID NO: 449 - protein, 80 aa, Homo sapiens
ESPEKKPACRKKKTRTVFSRSQVFQLESTFDMKRYLSSSERAGLAASLHLTETQVKIWFQNRRNKWKRQLAAELEAANLS

SEQ ID NO: 450 - protein, 80 aa, Homo sapiens
RGGVGVGGGRKKKTRTVFSRSQVFQLESTFDLKRYLSSAERAGLAASLQLTETQVKIWFQNRRNKWKRQLAAELEAASLS

SEQ ID NO: 451 - protein, 80 aa, Homo sapiens
ELLAHGRQKILDLLNEGSARDLRSLQRIGPKKAQLIVGWRELHGPFSQVEDLERVEGITGKQMESFLKANILGLAAGQRC

SEQ ID NO: 452 - protein, 80 aa, Homo sapiens
ESPYGETISPEDAPESISKAVASLPPEQMFELMKQMKLCVQNSPQEARNMLLQNPQLAYALLQAQVVMRIVDPEIALKIL

SEQ ID NO: 453 - protein, 80 aa, Homo sapiens
AGPLHKGKKAVNKDSLEYRLRRERNNIAVRKSRDKAKRRILETQQKVLEYMAENERLRSRVEQLTQELDTLRNLFRQIPE

SEQ ID NO: 454 - protein, 80 aa, Homo sapiens
IRIVNGKPKKVRKPRTIYSSFQLAALQRRFQKTQYLALPERAELAASLGLTQTQVKIWFQNRRSKFKKMWKSGEIPSEQH

SEQ ID NO: 455 - protein, 80 aa, Homo sapiens
TVYQFCSPSCWTKFQRTSPEGGIHLSCHYCHSLFSGKPEVLDWQDQVFQFCCRDCCEDFKRLRGVVSQCEHCRQEKLLHE

SEQ ID NO: 456 - protein, 80 aa, Homo sapiens
TMVDTEMPFWPTNFGISSVDLSVMEDHSHSFDIKPFTTVDFSSISTPHYEDIPFTRTDPVVADYKYDLKLQEYQSAIKVE

SEQ ID NO: 457 - protein, 80 aa, Homo sapiens
GRHHAELLKPRCSACDEIIFADECTEAEGRHWHMKHFCCLECETVLGGQRYIMKDGRPFCCGCFESLYAEYCETCGEHIG

SEQ ID NO: 458 - protein, 80 aa, Homo sapiens
DPDKESPGCKRRRTRTNFTGWQLEELEKAFNESHYPDVFMREALALRLDLVESRVQVWFQNRRAKWRKKENTKKGPGRPA

SEQ ID NO: 459 - protein, 80 aa, Homo sapiens
TEQPTPRQKKPRRSRTIFTELQLMGLEKKFQKQKYLSTPDRLDLAQSLGLTQLQVKTWYQNRRMKWKKMVLKGGQEAPTK

SEQ ID NO: 460 - protein, 80 aa, Homo sapiens
SMELAKNKSKKRRNRTTFSTFQLEELEKVFQKTHYPDVYAREQLALRTDLTEARVQVWFQNRRAKWRKRERYGKIQEGRN

SEQ ID NO: 461 - protein, 80 aa, Homo sapiens
GGGGGAGPVVVVRQRQAANARERDRTQSVNTAFTALRTLIPTEPVDRKLSKIETVRLASSYIAHLANVLLLGDSADDGQP

SEQ ID NO: 462 - protein, 80 aa, Homo sapiens
IDDTVEGITGNLFEVYLKPYFLEAYRPIRKGDIFLVRGGMRAVEFKVVETDPSPYCIVAPDTVIHCEGEPIKREDEEESL

SEQ ID NO: 463 - protein, 80 aa, Homo sapiens
SALNQTKKRKKRRHRTIFTSYQLEELEKAFNEAHYPDVYAREMLAMKTELPEDRIQVWFQNRRAKWRKREKCWGRSSVMA

SEQ ID NO: 464 - protein, 80 aa, Homo sapiens
DGLPWGAAPGRARKKRKPYTKQQIAELENEFLVNEFINRQKRKELSNRLNLSDQQVKIWFQNRRMKKKRVVLREQALALY

SEQ ID NO: 465 - protein, 80 aa, Homo sapiens
GGGGSGKTRTKDKYRVVYTDHQRLELEKEFHYSRYITIRRKSELAANLGLTERQVKIWFQNRRAKERKVNKKKQQQQQPP

SEQ ID NO: 466 - protein, 80 aa, Homo sapiens
TRAGGLALGRSEASPENAARERSRVRTLRQAFLALQAALPAVPPDTKLSKLDVLVLAASYIAHLTRTLGHELPGPAWPPF

SEQ ID NO: 467 - protein, 80 aa, Homo sapiens
KCDSNVSSSKKRRHRTTFTSLQLEELEKVFQKTHYPDVYVREQLALRTELTEARVQVWFQNRRAKWRKRERYGQIQQAKS

SEQ ID NO: 468 - protein, 80 aa, Homo sapiens
NAANWLTAKSGRKKRCPYTKHQTLELEKEFLFNMYLTRERRLEISRSVHLTDRQVKIWFQNRRMKLKKMNRENRIRELTA

SEQ ID NO: 469 - protein, 80 aa, Homo sapiens
LSEEEQPKKKHRRNRTTFTTYQLHELERAFEKSHYPDVYSREELAGKVNLPEVRVQVWFQNRRAKWRRQEKLEVSSMKLQ

SEQ ID NO: 470 - protein, 80 aa, Homo sapiens
HMAGLAEYPMQGELASAISSGKKKRKRCGMCAPCRRRINCEQCSSCRNRKTGHQICKFRKCEELKKKPSAALEKVMLPTG

SEQ ID NO: 471 - protein, 80 aa, Homo sapiens
SITKHPSTWSVEAVVLFLKQTDPLALCPLVDLFRSHEIDGKALLLLTSDVLLKHLGVKLGTAVKLCYYIDRLKQGKCFEN

SEQ ID NO: 472 - protein, 80 aa, Homo sapiens
ACRRKREFIPDEKKDAMYWEKRRKNNEAAKRSREKRRLNDLVLENKLIALGEENATLKAELLSLKLKFGLISSTAYAQEI

SEQ ID NO: 473 - protein, 80 aa, Homo sapiens
EIRFNGKGKKIRKPRTIYSSLQLQALNHRFQQTQYLALPERAELAASLGLTQTQVKIWFQNKRSKFKKLLKQGSNPHESD

SEQ ID NO: 474 - protein, 80 aa, Homo sapiens
GLHGTRQEEMIDHRLTDREWAEEWKHLDHLLNCIMDMVEKTRRSLTVLRRCQEADREELNYWIRRYSDAEDLKKGGGSSS

SEQ ID NO: 475 - protein, 80 aa, Homo sapiens
ELSAVGERVFAAEALLKRRIRKGRMEYLVKWKGWSQKYSTWEPEENILDARLLAAFEEREREMELYGPKKRGPKPKTFLL

SEQ ID NO: 476 - protein, 80 aa, Homo sapiens
AREKSAGKRGPDRGSPEYRQRRERNNIAVRKSRDKAKRRNQEMQQKLVELSAENEKLHQRVEQLTRDLAGLRQFFKQLPS

SEQ ID NO: 477 - protein, 80 aa, Homo sapiens
SGGCDNLIKLWKEEEDGQWKEEQKLEAHSDWVRDVAWAPSIGLPTSTIASCSQDGRVFIWTCDDASSNTWSPKLLHKFND

SEQ ID NO: 478 - protein, 80 aa, Homo sapiens
VKGVDLDAPGSINGVPLLEVDLDSFEDKPWRKPGADLSDYFNYGFNEDTWKAYCEKQKRIRMGLEVIPVTSTTNKITAED

SEQ ID NO: 479 - protein, 80 aa, Homo sapiens
KADSESNKGKKRRNRTTFTSYQLEELEKVFQKTHYPDVYAREQLAMRTDLTEARVQVWFQNRRAKWRKRERFGQMQQVRT

SEQ ID NO: 480 - protein, 80 aa, Homo sapiens
TAKQREAEATAKRPRTTITAKQLETLKSAYNTSPKPARHVREQLSSETGLDMRVVQVWFQNRRAKEKRLKKDAGRQRWGQ

SEQ ID NO: 481 - protein, 80 aa, Homo sapiens
GRHHAECLKPRCAACDEIIFADECTEAEGRHWHMKHFCCFECETVLGGQRYIMKEGRPYCCHCFESLYAEYCDTCAQHIG

SEQ ID NO: 482 - protein, 80 aa, Homo sapiens
IIGGDRPDEFLQVKNVLKDGPAAQDGKIAPGDVIVDINGNCVLGHTHADVVQMFQLVPVNQYVNLTLCRGYPLPDDSEDP

SEQ ID NO: 483 - protein, 80 aa, Homo sapiens
CCPECDTRVTSQCLDQNGHKLYRSGDNWTHSCQQCRCLEGEVDCWPLTCPNLSCEYTAILEGECCPRCVSDPCLADNITY

SEQ ID NO: 484 - protein, 80 aa, Homo sapiens
LNSEEKKKRKQRRNRTTFNSSQLQALERVFERTHYPDAFVREDLARRVNLTEARVQVWFQNRRAKFRRNERAMLANKNAS

SEQ ID NO: 485 - protein, 80 aa, Homo sapiens
GLNGGYQDELVDHRLTEREWADEWKHLDHALNCIMEMVEKTRRSMAVLRRCQESDREELNYWKRRYNENTELRKTGTELV

SEQ ID NO: 486 - protein, 80 aa, Homo sapiens
GPGEEAPKKKHRRNRTTFTTYQLHQLERAFEASHYPDVYSREELAAKVHLPEVRVQVWFQNRRAKWRRQERLESGSGAVA

SEQ ID NO: 487 - protein, 80 aa, Homo sapiens
VRMVNGKPKKVRKPRTIYSSYQLAALQRRFQKAQYLALPERAELAAQLGLTQTQVKIWFQNRRSKFKKLYKNGEVPLEHS

SEQ ID NO: 488 - protein, 80 aa, Homo sapiens
EVRFNGKGKKIRKPRTIYSSLQLQALNRRFQQTQYLALPERAELAASLGLTQTQVKIWFQNKRSKFKKLMKQGGAALEGS

SEQ ID NO: 489 - protein, 80 aa, Homo sapiens
GRSEQPKARQRRKPRVLFSQAQVLALERRFKQQRYLSAPEREHLASALQLTSTQVKIWFQNRRYKCKRQRQDKSLELAGH

SEQ ID NO: 490 - protein, 80 aa, Homo sapiens
LPRTLGELQLYRILQKANLLSYFDAFIQQGGDDVQQLCEAGEEEFLEIMALVGMASKPLHVRRLQKALRDWVTNPGLFNQ

SEQ ID NO: 491 - protein, 80 aa, Homo sapiens
NLSLDEDIQKWTVDDVHSFIRSLPGCSDYAQVFKDHAIDGETLPLLTEEHLRGTMGLKLGPALKIQSQVSQHVGSMFYKK

SEQ ID NO: 492 - protein, 80 aa, Homo sapiens
SPEDGSLKKKQRRQRTHFTSQQLQELEATFQRNRYPDMSTREEIAVWTNLTEARVRVWFKNRRAKWRKRERSQQAELCKG

SEQ ID NO: 493 - protein, 80 aa, Homo sapiens
SNLLVSASDDKTLKIWDVSSGKCLKTLKGHSNYVFCCNFNPQSNLIVSGSFDESVRIWDVKTGKCLKTLPAHSDPVSAVH

SEQ ID NO: 494 - protein, 80 aa, Homo sapiens
GNYKSEVNSKPRKERTAFTKEQIRELEAEFAHHNYLTRLRRYEIAVNLDLTERQVKVWFQNRRMKWKRVKGGQQGAAARE

SEQ ID NO: 495 - protein, 80 aa, Homo sapiens
LPRTLGELQLYRVLQRANLLSYYETFIQQGGDDVQQLCEAGEEEFLEIMALVGMATKPLHVRRLQKALREWATNPGLFSQ

SEQ ID NO: 496 - protein, 80 aa, Homo sapiens
PEEPTIGDIYNGKVTSIMQFGCFVQLEGLRKRWEGLVHISELRREGRVANVADVVSKGQRVKVKVLSFTGTKTSLSMKDV

SEQ ID NO: 497 - protein, 80 aa, Homo sapiens
YAFNHPFSINNLMSSEQQHHHSHHHHQPHKMDLKAYEQVMHYPGYGSPMPGSLAMGPVTNKTGLDASPLAADTSYYQGVY

SEQ ID NO: 498 - protein, 80 aa, Homo sapiens
TAAAGPAPPTAPEPAGASSEPEAGDWRPEMSPCSNVVVTDVTSNLLTVTIKEFCNPEDFEKVAAGVAGAAGGGGSIGASK

SEQ ID NO: 499 - protein, 80 aa, Homo sapiens
FLLHNALARKPKRIRTAFSPSQLLRLEHAFEKNHYVVGAERKQLAHSLSLTETQVKVWFQNRRTKFKRQKLEEEGSDSQQ

SEQ ID NO: 500 - protein, 80 aa, Homo sapiens
KRIALYIGNLTWWTTDEDLTEAVHSLGVNDILEIKFFENRANGQSKGFALVGVGSEASSKKLMDLLPKRELHGQNPVVTP

SEQ ID NO: 501 - protein, 80 aa, Homo sapiens
SGAPWYPINSRSRKKRKPYSKLQLAELEGEFLVNEFITRQRRRELSDRLNLSDQQVKIWFQNRRMKKKRLLLREQALSFF

SEQ ID NO: 502 - protein, 80 aa, Homo sapiens
SDNLYPESITSRDCVQLGPPSEGELVELRWTDGNLYKAKFISSVTSHIYQVEFEDGSQLTVKRGDIFTLEEELPKRVRSR

SEQ ID NO: 503 - protein, 80 aa, Homo sapiens
GIPASKVSKWSTDEVSEFIQSLPGCEEHGKVFKDEQIDGEAFLLMTQTDIVKIMSIKLGPALKIFNSILMFKAAEKNSHN

SEQ ID NO: 504 - protein, 80 aa, Homo sapiens
EPSGLHEKRKQRRIRTTFTSAQLKELERVFAETHYPDIYTREELALKIDLTEARVQVWFQNRRAKFRKQERAASAKGAAG

SEQ ID NO: 505 - protein, 80 aa, Homo sapiens
LLLHGPFARKPKRIRTAFSPSQLLRLERAFEKNHYVVGAERKQLAGSLSLSETQVKVWFQNRRTKYKRQKLEEEGPESEQ

SEQ ID NO: 506 - protein, 80 aa, Homo sapiens
SSGNDDDLTIPRAAINKMIKETLPNVRVANDARELVVNCCTEFIHLISSEANEICNKSEKKTISPEHVIQALESLGFGSY

SEQ ID NO: 507 - protein, 80 aa, Homo sapiens
ERRPQAPAKKLRKPRTIYSSLQLQHLNQRFQHTQYLALPERAQLAAQLGLTQTQVKIWFQNKRSKYKKLLKQNSGGQEGD

SEQ ID NO: 508 - protein, 80 aa, Homo sapiens
NVQDRVKRPMNAFIVWSRDQRRKMALENPRMRNSEISKQLGYQWKMLTEAEKWPFFQEAQKLQAMHREKYPNYKYRPRRK

SEQ ID NO: 509 - protein, 80 aa, Homo sapiens
EITRLAVWAAVQAVERKLEAQAMRLLTLEGRTGTNEKKIADCEKTAVEFANHLESKWVVLGTLLQEYGLLQRRLENMENL

SEQ ID NO: 510 - protein, 80 aa, Homo sapiens
CEKDIDECSEGIIECHNHSRCVNLPGWYHCECRSGFHDDGTYSLSGESCIDIDECALRTHTCWNDSACINLAGGFDCLCP

SEQ ID NO: 511 - protein, 80 aa, Homo sapiens
AAISLWTVVAAVQAIERKVEIHSRRLLHLEGRTGTAEKKLASCEKTVTELGNQLEGKWAVLGTLLQEYGLLQRRLENLEN

SEQ ID NO: 512 - protein, 80 aa, Homo sapiens
GQNRPLIKPKRRLSAARRAGTSCANCQTTTTTLWRRNANGDPVCNACGLYYKLHNINRPLTMKKEGIQTRNRKMSSKSKK

SEQ ID NO: 513 - protein, 80 aa, Homo sapiens
HAELPGKHCRRRKARTVFSDSQLSGLEKRFEIQRYLSTPERVELATALSLSETQVKTWFQNRRMKHKKQLRKSQDEPKAP

SEQ ID NO: 514 - protein, 80 aa, Homo sapiens
QDATVYVGGLDEKVSEPLLWELFLQAGPVVNTHMPKDRVTGQHQGYGFVEFLSEEDADYAIKIMNMIKLYGKPIRVNKAS

SEQ ID NO: 515 - protein, 80 aa, Homo sapiens
PIDNDAEGVWSPDIEQSFQEALAIYPPCGRRKIILSDEGKMYGRNELIARYIKLRTGKTRTRKQVSSHIQVLARRKSRDF

SEQ ID NO: 516 - protein, 80 aa, Homo sapiens
GLDNDAEGVWSPDIEQSFQEALAIYPPCGRRKIILSDEGKMYGRNELIARYIKLRTGKTRTRKQVSSHIQVLARKKVREY

SEQ ID NO: 517 - protein, 80 aa, Homo sapiens
DSVGTPQSNGGMRLHDFVSKTVIKPESCVPCGKRIKFGKLSLKCRDCRVVSHPECRDRCPLPCIPTLIGTPVKIGEGMLA

SEQ ID NO: 518 - protein, 80 aa, Homo sapiens
SAPHSMTASSSSVSSPSPGLPRRSAPPSPLCRSLSPGTGGGVRGGVGYLSRGDPVRVLARRVRPDGSVQYLVEWGGGGIF

SEQ ID NO: 519 - protein, 80 aa, Homo sapiens
GDPHYSFNHPFSINNLMSSSEQQHKLDFKAYEQALQYSPYGSTLPASLPLGSASVTTRSPIEPSALEPAYYQGVYSRPVL

SEQ ID NO: 520 - protein, 80 aa, Homo sapiens
GQNRPLIKPKRRLSAARRAGTCCANCQTTTTTLWRRNANGDPVCNACGLYYKLHNVNRPLTMKKEGIQTRNRKMSNKSKK

SEQ ID NO: 521 - protein, 80 aa, Homo sapiens
DSLSGSSLYSTSANLPVMGHEKFPSDLDLDMFNGSLECDMESIIRSELMDADGLDFNFDSLISTQNVVGLNVGNFTGAKQ

SEQ ID NO: 522 - protein, 80 aa, Homo sapiens
TEISLWTVVAAIQAVEKKMESQAARLQSLEGRTGTAEKKLADCEKMAVEFGNQLEGKWAVLGTLLQEYGLLQRRLENVEN

SEQ ID NO: 523 - protein, 80 aa, Homo sapiens
MDSGTRRKNATRETTSTLKAWLQEHRKNPYPTKGEKIMLAIITKMTLTQVSTWFANARRRLKKENKMTWPPRNKCADEKR

SEQ ID NO: 524 - protein, 80 aa, Homo sapiens
NIEKQIYLPSTRAKTSIVWHFFHVDPQYTWRAICNLCEKSVSRGKPGSHLGTSTLQRHLQARHSPHWTRANKFGVASGEE

SEQ ID NO: 525 - protein, 80 aa, Homo sapiens
AKQNDDSEAGAKRPRTTITAKQLETLKNAYKNSPKPARHVREQLSSETGLDMRVVQVWFQNRRAKEKRLKKDAGRHRWGQ

SEQ ID NO: 526 - protein, 80 aa, Homo sapiens
DALSYLDQVKLQFGSQPQVYNDFLDIMKEFKSQSIDTPGVISRVSQLFKGHPDLIMGFNTFLPPGYKIEVQTNDMVNVTT

SEQ ID NO: 527 - protein, 80 aa, Homo sapiens
DDHTVCLWDINAGPKEGKIVDAKAIFTGHSAVVEDVAWHLLHESLFGSVADDQKLMIWDTRSNTTSKPSHLVDAHTAEVN

SEQ ID NO: 528 - protein, 80 aa, Homo sapiens
GSILLDKDGKRKHTRPTFSGQQIFALEKTFEQTKYLAGPERARLAYSLGMTESQVKVWFQNRRTKWRKKHAAEMATAKKK

SEQ ID NO: 529 - protein, 80 aa, Homo sapiens
DPTALVEAIVEEVACPICMTFLREPMSIDCGHSFCHSCLSGLWEIPGESQNWGYTCPLCRAPVQPRNLRPNWQLANVVEK

SEQ ID NO: 530 - protein, 80 aa, Homo sapiens
QSLPKKVSLSSDTTRKPLEIRSPSAESKKPKWVPPAASGGSRSSSSPLVVVSVKSPNQSLRLGLSRLARVKPLHPNATST

SEQ ID NO: 531 - protein, 80 aa, Homo sapiens
AKSSQRKQRDCVNQCKSKPGLSTSIPLRMSSYTFKRPVTRITPHPGNEVRYHQWEESLEKPQQVCWQRRLQGLQAYSSAG

SEQ ID NO: 532 - protein, 80 aa, Homo sapiens
VRMVNGKPKKVRKPRTIYSSFQLAALQRRFQKTQYLALPERAELAASLGLTQTQVKIWFQNKRSKIKKIMKNGEMPPEHS

SEQ ID NO: 533 - protein, 80 aa, Homo sapiens
LQCNNHACGWDGGDCSLNFNDPWKNCTQSLQCWKYFSDGHCDSQCNSAGCLFDGFDCQRAEGQCNPLYDQYCKDHFSDGH

SEQ ID NO: 534 - protein, 80 aa, Homo sapiens
ETWVEEDELFQVQAAPDEDSTTNITKKQKWTVEESEWVKAGVQKYGEGNWAAISKNYPFVNRTAVMIKDRWRTMKRLGMN

SEQ ID NO: 535 - protein, 80 aa, Homo sapiens
AEISLWTVVAAIQAVERKVDAQASQLLNLEGRTGTAEKKLADCEKTAVEFGNHMESKWAVLGTLLQEYGLLQRRLENLEN

SEQ ID NO: 536 - protein, 80 aa, Homo sapiens
LEKRTLFRLDLVPINRSVGLKAKPTKPVTEVLRPVVARYGLDLSGLLVRLSGEKEPLDLGAPISSLDGQRVVLEEKDPSR

SEQ ID NO: 537 - protein, 80 aa, Homo sapiens
PNCLSSSMQLPHGGGRHQELVRFRDVAVVFSPEEWDHLTPEQRNLYKDVMLDNCKYLASLGNWTYKAHVMSSLKQGKEPW

SEQ ID NO: 538 - protein, 80 aa, Homo sapiens
DDYKEGDLRIMPESSESPPTEREPGGVVDGLIGKHVEYTKEDGSKRIGMVIHQVEAKPSVYFIKFDDDFHIYVYDLVKKS

SEQ ID NO: 539 - protein, 80 aa, Homo sapiens
SEPDLPLKRKQRRSRTTFTAEQLEELEKAFERTHYPDIYTREELAQRTKLTEARVQVWFSNRRARWRKQAGANQLAAFNH

SEQ ID NO: 540 - protein, 80 aa, Homo sapiens
AGGVLDKDGKKKHSRPTFSGQQIFALEKTFEQTKYLAGPERARLAYSLGMTESQVKVWFQNRRTKWRKRHAVEMASAKKK

SEQ ID NO: 541 - protein, 80 aa, Homo sapiens
DVMSFSVTVTTIPASQAMNPSSHGQTIPVQAFSEENSIEGTPSKCYCRLKAMIMCKGCGAFCHDDCIGPSKLCVSCLVVR

SEQ ID NO: 542 - protein, 80 aa, Homo sapiens
GGYSSVSSCNGYGRMGLLHQEKLPSDLDGMFIERLDCDMESIIRNDLMDGDTLDFNFDNVLPNQSFPHSVKTTTHSWVSG

SEQ ID NO: 543 - protein, 80 aa, Homo sapiens
GGSPTGFGCKSRPKARSSTGRECVNCGATSTPLWRRDGTGHYLCNACGLYHKMNGQNRPLIKPKRRLSAARRAGTSCANC

SEQ ID NO: 544 - protein, 80 aa, Homo sapiens
GQNRPLIRPKKRLIVSKRAGTQCTNCQTTTTTLWRRNASGDPVCNACGLYYKLHQVNRPLTMRKDGIQTRNRKASGKGKK

SEQ ID NO: 545 - protein, 80 aa, Homo sapiens
PVALLRKQNFQPTAQQQLTKPAKITCANCKKPLQKGQTAYQRKGSAHLFCSTTCLSSFSHKRTQNTRSIICKKDASTKKA

SEQ ID NO: 546 - protein, 80 aa, Homo sapiens
TEITLWTVVAAIQALEKKVDSCLTRLLTLEGRTGTAEKKLADCEKTAVEFGNQLEGKWAVLGTLLQEYGLLQRRLENVEN

SEQ ID NO: 547 - protein, 80 aa, Homo sapiens
KKQRGRPSSQPRRNIVGCRISHGWKEGDEPITQWKGTVLDQVPINPSLYLVKYDGIDCVYGLELHRDERVLSLKILSDRV

SEQ ID NO: 548 - protein, 80 aa, Homo sapiens
WTCDLDDDCGDRSDESASCAYPTCFPLTQFTCNNGRCININWRCDNDNDCGDNSDEAGCSHSCSSTQFKCNSGRCIPEHW

SEQ ID NO: 549 - protein, 80 aa, Homo sapiens
PKGAAAPSASQRRKRTSFSAEQLQLLELVFRRTRYPDIHLRERLAALTLLPESRIQVWFQNRRAKSRRQSGKSFQPLARP

SEQ ID NO: 550 - protein, 80 aa, Homo sapiens
KIKYDWYQTESQVVITLMIKNVQKNDVNVEFSEKELSALVKLPSGEDYNLKLELLHPIIPEQSTFKVLSTKIEIKLKKPE

SEQ ID NO: 551 - protein, 80 aa, Homo sapiens
DPSKEVEYVCELCKGAAPPDSPVVYSDRAGYNKQWHPTCFVCAKCSEPLVDLIYFWKDGAPWCGRHYCESLRPRCSGCDE

SEQ ID NO: 552 - protein, 80 aa, Homo sapiens
GSGAGKAKKSVDKNSNEYRVRRERNNIAVRKSRDKAKQRNVETQQKVLELTSDNDRLRKRVEQLSRELDTLRGIFRQLPE

SEQ ID NO: 553 - protein, 80 aa, Homo sapiens
GPASSFTPKQRSKARSCSEGRECVNCGATATPLWRRDGTGHYLCNACGLYHKMNGQNRPLIKPKRRLSAARRAGTCCANC

SEQ ID NO: 554 - protein, 80 aa, Homo sapiens
KPSDHIKRPMNAFMVWSRGQRRKMAQENPKMHNSEISKRLGAEWKLLSEAEKRPYIDEAKRLRAQHMKEHPDYKYRPRRK

SEQ ID NO: 555 - protein, 80 aa, Homo sapiens
LYSGFQQTADKCSVCGHLIMEMILQALGKSYHPGCFRCSVCNECLDGVPFTVDVENNIYCVRDYHTVFAPKCASCARPIL

SEQ ID NO: 556 - protein, 80 aa, Homo sapiens
HPSQDLVFSASPDATIRIWSVPNASCVQVVRAHESAVTGLSLHATGDYLLSSSDDQYWAFSDIQTGRVLTKVTDETSGCS

SEQ ID NO: 557 - protein, 80 aa, Homo sapiens
ELSAVGERVFAAESIIKRRIRKGRIEYLVKWKGWAIKYSTWEPEENILDSRLIAAFEQKERERELYGPKKRGPKPKTFLL

SEQ ID NO: 558 - protein, 80 aa, Homo sapiens
RTGSDSKSGKPRRARTAFTYEQLVALENKFKATRYLSVCERLNLALSLSLTETQVKIWFQNRRTKWKKQNPGADTSAPTG

SEQ ID NO: 559 - protein, 80 aa, Homo sapiens
VWDLSKIGEEQSPEDAEDGPPELLFIHGGHTAKISDFSWNPNEPWVICSVSEDNIMQVWQMAENIYNDEDPEGSVDPEGQ

SEQ ID NO: 560 - protein, 80 aa, Homo sapiens
ERCTPAGGGAEPRKLSRTPKCARCRNHGVVSCLKGHKRFCRWRDCQCANCLLVVERQRVMAAQVALRRQQATEDKKGLSG

SEQ ID NO: 561 - protein, 80 aa, Homo sapiens
SQPGALIPGDPQAMSQPNRGPSPFSPVQLHQLRAQILAYKMLARGQPLPETLQLAVQGKRTLPGLQQQQQQQQQQQQQQQ

SEQ ID NO: 562 - protein, 573 aa, Synthetic construct; identical to SEQ ID NO: 89

SEQ ID NO: 563 - protein, 441 aa, Homo sapiens
MSEREVSTAPAGTDMPAAKKQKLSSDENSNPDLSGDENDDAVSIESGTNTERPDTPTNTPNAPGRKSWGKGKWKSKKCKYSFKCVNSLKEDHNQPLFGVQFNWHSKEGDPLVFATVGSNRVTLYECHSQGEIRLLQSYVDADADENFYTCAWTYDSNTSHPLLAVAGSRGIIRIINPITMQCIKHYVGHGNAINELKFHPRDPNLLLSVSKDHALRLWNIQTDTLVAIFGGVEGHRDEVLSADYDLLGEKIMSCGMDHSLKLWRINSKRMMNAIKESYDYNPNKTNRPFISQKIHFPDFSTRDIHRNYVDCVRWLGDLILSKSCENAIVCWKPGKMEDDIDKIKPSESNVTILGRFDYSQCDIWYMRFSMDFWQKMLALGNQVGKLYVWDLEVEDPHKAKCTTLTHHKCGAAIRQTSFSRDSSILIAVCDDASIWRWDRLR

SEQ ID NO: 564 - protein, 485 aa, Homo sapiens
MPAMVEKGPEVSGKRRGRNNAAASASAAAASAAASAACASPAATAASGAAASSASAAAASAAAAPNNGQNKSLAAAAPNGNSSSNSWEEGSSGSSSDEEHGGGGMRVGPQYQAVVPDFDPAKLARRSQERDNLGMLVWSPNQNLSEAKLDEYIAIAKEKHGYNMEQALGMLFWHKHNIEKSLADLPNFTPFPDEWTVEDKVLFEQAFSFHGKTFHRIQQMLPDKSIASLVKFYYSWKKTRTKTSVMDRHARKQKREREESEDELEEANGNNPIDIEVDQNKESKKEVPPTETVPQVKKEKHSTQAKNRAKRKPPKGMFLSQEDVEAVSANATAATTVLRQLDMELVSVKRQIQNIKQTNSALKEKLDGGIEPYRLPEVIQKCNARWTTEEQLLAVQAIRKYGRDFQAISDVIGNKSVVQVKNFFVNYRRRFNIDEVLQEWEAEHGKEETNGPSNQKPVKSPDNSIKMPEEEDEAPVLDVRYASAS

SEQ ID NO: 565 - protein, 77 aa, Synthetic construct
TGRTLVTFKDVFVDFTREEWKLLDTAQQIVYRNVMLENYKNLVSLGYQLTKPDVILRLEKGEEPLEINLWITKFVKD

SEQ ID NO: 566 - protein, 120 aa, Synthetic construct
MYPYDVPDYASPKKKRKVGGGASMDAKSLTAWSRTLVTFKDVFVDFTREEWKLLDTAQQIVYRNVMLENYKNLVSLGYQLTKPDVILRLEKGEEPWLVEREIHQETHPDSETAFEIKSSV

SEQ ID NO: 567 - protein, 117 aa, Synthetic construct
ALSPQHSAVTQGSIIKNKEGMDAKSLTAWSRTLVTFKDVFVDFTREEWKLLDTAQQIVYRNVMLENYKNLVSLGYQLTKPDVILRLEKGEEPWLVEREIHQETHPDSETAFEIKSSV

SEQ ID NO: 568 - protein, 62 aa, Synthetic construct
RTLVTFKDVFVDFTREEWKLLDTAQQIVYRNVMLENYKNLVSLGYQLTKPDVILRLEKGEEP

SEQ ID NO: 569 - protein, 98 aa, Synthetic construct
RTLVTFKDVFVDFTREEWKLLDTAQQIVYRNVMLENYKNLVSLGYQLTKPDVILRLEKGEEPWLVEREIHQETHPDSETAFEIKSSVSSRSIFKDKQS

SEQ ID NO: 570 - protein, 99 aa, Synthetic construct
RTLVTFKDVAVDFTQEEWQQLDPAQKIVYRDVMLENYSNLVSVGYQLTKPDVILRLEQKGEEPWLVEEEIHQETHPDSETAFEIKSSVSSRSIFKDKQS

SEQ ID NO: 571 - protein, 95 aa, Synthetic construct
RTLVTFKDVFVDFTREEWKLLDTAQQIVYRNVMLENYKNLVSLGYQLTKPDVILRLEKGEEPWLEEEEVLGSGRAEKNGDIGGQIWKPKDVKESL

SEQ ID NO: 572 - protein, 103 aa, Synthetic construct
MNNSQGRVTFEDVTVNFTQGEWQRLNPEQRNLYRDVMLENYSNLVSVGQGETTKPDVILRLEQGKEPWLVEREIHQETHPDSETAFEIKSSVSSRSIFKDKQS

SEQ ID NO: 573 - protein, 1615 aa, Homo sapiens
MPARTAPARVPTLAVPAISLPDDVRRRLKDLERDSLTEKECVKEKLNLLHEFLQTEIKNQLCDLETKLRKEELSEEGYLAKVKSLLNKDLSLENGAHAYNREVNGRLENGNQARSEARRVGMADANSPPKPLSKPRTPRRSKSDGEAKPEPSPSPRITRKSTRQTTITSHFAKGPAKRKPQEESERAKSDESIKEEDKDQDEKRRRVTSRERVARPLPAEEPERAKSGTRTEKEEERDEKEEKRLRSQTKEPTPKQKLKEEPDREARAGVQADEDEDGDEKDEKKHRSQPKDLAAKRRPEEKEPEKVNPQISDEKDEDEKEEKRRKTTPKEPTEKKMARAKTVMNSKTHPPKCIQCGQYLDDPLKYGQHPPDAVDEPQMLTNEKLSIFDANESGFESYEALPQHKLTCFSVYCKHGHLCPIDTGLIEKNIELFFSGSAKPIYDDDPSLEGGVNGKNLGPINEWWITGFDGGEKALIGFSTSFAEYILMDPSPEYAPIFGLMQEKIYISKIVVEFLQSNSDSTYEDLINKIETTVPPSGLNLNRFTEDSLLRHAQFVVEQVESYDEAGDSDEQPIFLTPCMRDLIKLAGVTLGQRRAQARRQTIRHSTREKDRGPTKATTTKLVYQIFDTFFAEQIEKDDREDKENAFKRRRCGVCEVCQQPECGKCKACKDMVKFGGSGRSKQACQERRCPNMAMKEADDDEEVDDNIPEMPSPKKMHQGKKKKQNKNRISWVGEAVKTDGKKSYYKKVCIDAETLEVGDCVSVIPDDSSKPLYLARVTALWEDSSNGQMFHAHWFCAGTDTVLGATSDPLELFLVDECEDMQLSYIHSKVKVIYKAPSENWAMEGGMDPESLLEGDDGKTYFYQLWYDQDYARFESPPKTQPTEDNKFKFCVSCARLAEMRQKEIPRVLEQLEDLDSRVLYYSATKNGILYRVGDGVYLPPEAFTFNIKLSSPVKRPRKEPVDEDLYPEHYRKYSDYIKGSNLDAPEPYRIGRIKEIFCPKKSNGRPNETDIKIRVNKFYRPENTHKSTPASYHADINLLYWSDEEAVVDFKAVQGRCTVEYGEDLPECVQVYSMGGPNRFYFLEAYNAKSKSFEDPPNHARSPGNKGKGKGKGKGKPKSQACEPSEPEIEIKLPKLRTLDVFSGCGGLSEGFHQAGISDTLWAIEMWDPAAQAFRLNNPGSTVFTEDCNILLKLVMAGETTNSRGQRLPQKGDVEMLCGGPPCQGFSGMNRFNSRTYSKFKNSLVVSFLSYCDYYRPRFFLLENVRNFVSFKRSMVLKLTLRCLVRMGYQCTFGVLQAGQYGVAQTRRRAIILAAAPGEKLPLFPEPLHVFAPRACQLSVVVDDKKFVSNITRLSSGPFRTITVRDTMSDLPEVRNGASALEISYNGEPQSWFQRQLRGAQYQPILRDHICKDMSALVAARMRHIPLAPGSDWRDLPNIEVRLSDGTMARKLRYTHHDRKNGRSSSGALRGVCSCVEAGKACDPAARQFNTLIPWCLPHTGNRHNHWAGLYGRLEWDGFFSTTVTNPEPMGKQGRVLHPEQHRVVSVRECARSQGFPDTYRLFGNILDKHRQVGNAVPPPLAKAIGLEIKLCMLAKARESASAKIKEEEAAKD

SEQ ID NO: 574 - protein, 912 aa, Homo sapiens
MPAMPSSGPGDTSSSAAEREEDRKDGEEQEEPRGKEERQEPSTTARKVGRPGRKRKHPPVESGDTPKDPAVISKSPSMAQDSGASELLPNGDLEKRSEPQPEEGSPAGGQKGGAPAEGEGAAETLPEASRAVENGCCTPKEGRGAPAEAGKEQKETNIESMKMEGSRGRLRGGLGWESSLRQRPMPRLTFQAGDPYYISKRKRDEWLARWKREAEKKAKVIAGMNAVEENQGPGESQKVEEASPPAVQQPTDPASPTVATTPEPVGSDAGDKNATKAGDDEPEYEDGRGFGIGELVWGKLRGFSWWPGRIVSWWMTGRSRAAEGTRWVMWFGDGKFSVVCVEKLMPLSSFCSAFHQATYNKQPMYRKAIYEVLQVASSRAGKLFPVCHDSDESDTAKAVEVQNKPMIEWALGGFQPSGPKGLEPPEEEKNPYKEVYTDMWVEPEAAAYAPPPPAKKPRKSTAEKPKVKEIIDERTRERLVYEVRQKCRNIEDICISCGSLNVTLEHPLFVGGMCQNCKNCFLECAYQYDDDGYQSYCTICCGGREVLMCGNNNCCRCFCVECVDLLVGPGAAQAAIKEDPWNCYMCGHKGTYGLLRRREDWPSRLQMFFANNHDQEFDPPKVYPPVPAEKRKPIRVLSLFDGIATGLLVLKDLGIQVDRYIASEVCEDSITVGMVRHQGKIMYVGDVRSVTQKHIQEWGPFDLVIGGSPCNDLSIVNPARKGLYEGTGRLFFEFYRLLHDARPKEGDDRPFFWLFENVVAMGVSDKRDISRFLESNPVMIDAKEVSAAHRARYFWGNLPGMNRPLASTVNDKLELQECLEHGRIAKFSKVRTITTRSNSIKQGKDQHFPVFMNEKEDILWCTEMERVFGFPVHYTDVSNMSRLARQRLLGRSWSVPVIRHLFAPLKEYFACV

SEQ ID NO: 575 - protein, 301 aa, Homo sapiens
NHDQEFDPPKVYPPVPAEKRKPIRVLSLFDGIATGLLVLKDLGIQVDRYIASEVCEDSITVGMVRHQGKIMYVGDVRSVTQKHIQEWGPFDLVIGGSPCNDLSIVNPARKGLYEGTGRLFFEFYRLLHDARPKEGDDRPFFWLFENVVAMGVSDKRDISRFLESNPVMIDAKEVSAAHRARYFWGNLPGMNRPLASTVNDKLELQECLEHGRIAKFSKVRTITTRSNSIKQGKDQHFPVFMNEKEDILWCTEMERVFGFPVHYTDVSNMSRLARQRLLGRSWSVPVIRHLFAPLKEYFACV

SEQ ID NO: 576 - protein, 853 aa, Homo sapiens
MKGDTRHLNGEEDAGGREDSILVNGACSDQSSDSPPILEAIRTPEIRGRRSSSRLSKREVSSLLSYTQDLTGDGDGEDGDGSDTPVMPKLFRETRTRSESPAVRTRNNNSVSSRERHRPSPRSTRGRQGRNHVDESPVEFPATRSLRRRATASAGTPWPSPPSSYLTIDLTDDTEDTHGTPQSSSTPYARLAQDSQQGGMESPQVEADSGDGDSSEYQDGKEFGIGDLVWGKIKGFSWWPAMVVSWKATSKRQAMSGMRWVQWFGDGKFSEVSADKLVALGLFSQHFNLATFNKLVSYRKAMYHALEKARVRAGKTFPSSPGDSLEDQLKPMLEWAHGGFKPTGIEGLKPNNTQPVVNKSKVRRAGSRKLESRKYENKTRRRTADDSATSDYCPAPKRLKTNCYNNGKDRGDEDQSREQMASDVANNKSSLEDGCLSCGRKNPVSFHPLFEGGLCQTCRDRFLELFYMYDDDGYQSYCTVCCEGRELLLCSNTSCCRCFCVECLEVLVGTGTAAEAKLQEPWSCYMCLPQRCHGVLRRRKDWNVRLQAFFTSDTGLEYEAPKLYPAIPAARRRPIRVLSLFDGIATGYLVLKELGIKVGKYVASEVCEESIAVGTVKHEGNIKYVNDVRNITKKNIEEWGPFDLVIGGSPCNDLSNVNPARKGLYEGTGRLFFEFYHLLNYSRPKEGDDRPFFWMFENVVAMKVGDKRDISRFLECNPVMIDAIKVSAAHRARYFWGNLPGMNRPVIASKNDKLELQDCLEYNRIAKLKKVQTITTKSNSIKQGKNQLFPVVMNGKEDVLWCTELERIFGFPVHYTDVSNMGRGARQKLLGRSWSVPVIRHLFAPLKDYFACE

SEQ ID NO: 577 - protein, 740 aa, Mus musculus
MRGGSRHLSNEEDVSGCEDCIIISGTCSDQSSDPKTVPLTQVLEAVCTVENRGCRTSSQPSKRKASSLISYVQDLTGDGDEDRDGEVGGSSGSGTPVMPQLFCETRIPSKTPAPLSWQANTSASTPWLSPASPYPIIDLTDEDVIPQSISTPSVDWSQDSHQEGMDTTQVDAESRDGGNIEYQVSADKLLLSQSCILAAFYKLVPYRESIYRTLEKARVRAGKACPSSPGESLEDQLKPMLEWAHGGFKPTGIEGLKPNKKQPENKSRRRTTNDPAASESSPPKRLKTNSYGGKDRGEDEESREQMASDVTNNKGNLEDHCLSCGRKDPVSFHPLFEGGLCQSCRDRFLELFYMYDEDGYQSYCTVCCEGRELLLCSNTSCCRCFCVECLEVLVGAGTAEDVKLQEPWSCYMCLPQRCHGVLRRRKDWNMRLQDFFTTDPDLEEFEPPKLYPAIPAAKRRPIRVLSLFDGIATGYLVLKELGIKVEKYIASEVCAESIAVGTVKHEGQIKYVDDIRNITKEHIDEWGPFDLVIGGSPCNDLSCVNPVRKGLFEGTGRLFFEFYRLLNYSCPEEEDDRPFFWMFENVVAMEVGDKRDISRFLECNPVMIDAIKVSAAHRARYFWGNLPGMNRPVMASKNDKLELQDCLEFSRTAKLKKVQTITTKSNSIRQGKNQLFPVVMNGKDDVLWCTELERIFGFPEHYTDVSNMGRGARQKLLGRSWSVPVIRHLFAPLKDHFACE

SEQ ID NO: 578 - protein, 387 aa, Homo sapiens
MAAIPALDPEAEPSMDVILVGSSELSSSVSPGTGRDLIAYEVKANQRNIEDICICCGSLQVHTQHPLFEGGICAPCKDKFLDALFLYDDDGYQSYCSICCSGETLLICGNPDCTRCYCFECVDSLVGPGTSGKVHAMSNWVCYLCLPSSRSGLLQRRRKWRSQLKAFYDRESENPLEMFETVPVWRRQPVRVLSLFEDIKKELTSLGFLESGSDPGQLKHVVDVTDTVRKDVEEWGPFDLVYGATPPLGHTCDRPPSWYLFQFHRLLQYARPKPGSPRPFFWMFVDNLVLNKEDLDVASRFLEMEPVTIPDVHGGSLQNAVRVWSNIPAIRSSRHWALVSEEELSLLAQNKQSSKLAAKWPTKLVKNCFLPLREYFKYFSTELTSSL

SEQ ID NO: 579 - protein, 213 aa, Homo sapiens
NPLEMFETVPVWRRQPVRVLSLFEDIKKELTSLGFLESGSDPGQLKHVVDVTDTVRKDVEEWGPFDLVYGATPPLGHTCDRPPSWYLFQFHRLLQYARPKPGSPRPFFWMFVDNLVLNKEDLDVASRFLEMEPVTIPDVHGGSLQNAVRVWSNIPAIRSRHWALVSEEELSLLAQNKQSSKLAAKWPTKLVKNCFLPLREYFKYFSTELTSSL

SEQ ID NO: 580 - protein, 421 aa, Mus musculus
MGSRETPSSCSKTLETLDLETSDSSSPDADSPLEEQWLKSSPALKEDSVDVVLEDCKEPLSPSSPPTGREMIRYEVKVNRRSIEDICLCCGTLQVYTRHPLFEGGLCAPCKDKFLESLFLYDDDGHQSYCTICCSGGTLFICESPDCTRCYCFECVDILVGPGTSERINAMACWVCFLCLPFSRSGLLQRRKRWRHQLKAFHDQEGAGPMEIYKTVSAWKRQPVRVLSLFRNIDKVLKSLGFLESGSGSGGGTLKYVEDVTNVVRRDVEKWGPFDLVYGSTQPLGSSCDRCPGWYMFQFHRILQYALPRQESQRPFFWIFMDNLLLTEDDQETTTRFLQTEAVTLQDVRGRDYQNAMRVWSNIPGLKSKHAPLTPKEEEYLQAQVRSRSKLDAPKVDLLVKNCLLPLREYFKYFSQNSLPL

SEQ ID NO: 581 - protein, 214 aa, Mus musculus
GPMEIYKTVSAWKRQPVRVLSLFRNIDKVLKSLGFLESGSGSGGGTLKYVEDVTNVVRRDVEKWGPFDLVYGSTQPLGSSCDRCPGWYMFQFHRILQYALPRQESQRPFFWIFMDNLLLTEDDQETTTRFLQTEAVTLQDVRGRDYQNAMRVWSNIPGLKSKHAPLTPKEEEYLQAQVRSRSKLDAPKVDLLVKNCLLPLREYFKYFSQNSLPL

SEQ ID NO: 582 - protein, 403 aa, Ailuropoda melanoleuca
MALSPTGTLSVETLDRSDPDPLDEGPWQATCEILLEPDAEHSTDVILVGSSELSAPASPGPRRDLLAYEVKVNQRDIEDVCICCGSLRVHTQHPLFEGGMCAPCKDKFLDCLFLYDDDGYQSYCSICCAGETLLICENPDCTRPSLMMKLRLFRECACLIFPSEGMLLQTVWFWKMTVVWQPGLRHLPQENPLETYKTVPVWKREPVRVLSLFGDIRRELMSLGFLESGSAPGRLKHLDDVTDVVRKDVEGWGPFDLVYGSTPPIGHACDHPPVWYLLQFHRILQYARPRPGSQQPFFWMFVDNLVLSQDDQTAATRFLEADPVTIQDVCGRAVRNTVHVWSNIPAVRSRHSALALCEELSLLAQDRQRTKPPAQGPAQLVKNCFLPLREYFKYFSTELTSSL

SEQ ID NO: 583 - protein, 213 aa, Ailuropoda melanoleuca
NPLETYKTVPVWKREPVRVLSLFGDIRRELMSLGFLESGSAPGRLKHLDDVTDVVRKDVEGWGPFDLVYGSTPPIGHACDHPPVWYLLQFHRILQYARPRPGSQQPFFWMFVDNLVLSQDDQTAATRFLEADPVTIQDVCGRAVRNTVHVWSNIPAVRSRHSALALCEELSLLAQDRQRTKPPAQGPAQLVKNCFLPLREYFKYFSTELTSSL

SEQ ID NO: 584 - protein, 426 aa, Carlito syrichta
MALSCRRTLPLESLHSSNSDLASQLDKEQWRPPCETHGIPVAAAPVLDLEAECSLDVILVGSSELSTSSSPRLGRDHIAYEVKVNQRNIEDICLCCGSFLVHTQHPLFEGGMCAPCKDKFLDTLFLYDEDGYQSYCSICCSGETLLICENPDCTRCYCFECLDTLVSPGTSEKVHAMSNWVCFLCLPFTRSGLLQRRRKWRGQLKAFYDRESESSLEMYKTVPVWKREPVRVLSLFGDIKKELMSLGFVETGSDPGRLRHLDDTTNIVRRNVEEWGPFHLLYGATPPLGHTCDRPPGWYLFQFHRLLQYARPQPGSPQPFFWMFVDNVMLTREDRAIASRFLETEPVTIPDIHGRALQNAVCVWSNIPAVRSKHSALVSEEELSLLAQDRQRAKLPTQGPTKLVKNCFLPLREYFKYFSTELTSFL

SEQ ID NO: 585 - protein, 213 aa, Carlito syrichta
SSLEMYKTVPVWKREPVRVLSLFGDIKKELMSLGFVETGSDPGRLRHLDDTTNIVRRNVEEWGPFHLLYGATPPLGHTCDRPPGWYLFQFHRLLQYARPQPGSPQPFFWMFVDNVMLTREDRAIASRFLETEPVTIPDIHGRALQNAVCVWSNIPAVRSKHSALVSEEELSLLAQDRQRAKLPTQGPTKLVKNCFLPLREYFKYFSTELTSFL

SEQ ID NO: 586 - protein, 424 aa, Meriones unguiculatus
MGSQETPSTRAKTPGTWNLESTDSSSPESLGHLEEQWANSSPDLKDEHSKDVEPEDSKELISSASPPSGREIIRYEISVNQRNIEDICLCCGTLQVYKQHPLFEGGICAPCKDKFLETFFLYDEDGHQSYCSICCSGGTLFICESPDCTRCYCFECVDILVGPGTSERINAMPCWVCFLCLPFTRSGLLQRRRKWRHQLKAFFDEGGASPLEMYKTVSAWKRKPMRVLSLFKNIDKELKNLGFLESGSGSEEERLKYLEDVTNVVRRDVEKWGPFDLVYGSTRPRGSSCDHCPAWYMFQFHRILQYARPPSGSEQPFFWVFVDNLLMTEDDQITADRFLQMKAVTLQDVRGRVLQNAVRVWSNIPGVKSKHMALTEKEEQSLEAQAGTRTKLSAQKVDPLVKNCLLPLREYFKFFSQNSLPLDK

SEQ ID NO: 587 - protein, 216 aa, Meriones unguiculatus
SPLEMYKTVSAWKRKPMRVLSLFKNIDKELKNLGFLESGSGSEEERLKYLEDVTNVVRRDVEKWGPFDLVYGSTRPRGSSCDHCPAWYMFQFHRILQYARPPSGSEQPFFWVFVDNLLMTEDDQITADRFLQMKAVTLQDVRGRVLQNAVRVWSNIPGVKSKHMALTEKEEQSLEAQAGTRTKLSAQKVDPLVKNCLLPLREYFKFFSQNSLPLDK

SEQ ID NO: 588 - protein, 409 aa, Ochotona princeps
MALPSPETLDSLDRVPASHPDEQHWTVCDNSDPILEVEAEGSMDVILVDDSPAPSGRDRIELEVKVNQRSIEDLCLCCGSSQVHRQHPLFQGGLCAPCKDKFLEALFLYDEDGYQSYCSICGLGDTLLVCESPDCTRGYCFACVDGLVGAGSSGHMHTVSPWVCFLCVPGSRHGLLQRRRRWRTQLKVFHEQEAAQPLEIYETVPACRRKPLRVLSLFEHIEKELASLGFLETGSSPGRIRHLDDVTDVVRRDVEQWGPFDLVYGSTPPLGHASPRSPGWYLFQFHRMLQYTQPTASTQRPFFWMFVDNLLLTRDDLVTATRFLEVEPATLQDVRGRVLQGAMRVWSNIPAVNSRHTELAPEAETALLAQSCRRAKASGEGLARLLKSCFLPLREYFKYFPQSPLPLRK

SEQ ID NO: 589 - protein, 214 aa, Ochotona princeps
QPLEIYETVPACRRKPLRVLSLFEHIEKELASLGFLETGSSPGRIRHLDDVTDVVRRDVEQWGPFDLVYGSTPPLGHASPRSPGWYLFQFHRMLQYTQPTASTQRPFFWMFVDNLLLTRDDLVTATRFLEVEPATLQDVRGRVLQGAMRVWSNIPAVNSRHTELAPEAETALLAQSCRRAKASGEGLARLLKSCFLPLREYFKYFPQSPLPLRK

SEQ ID NO: 590 - protein, 224 aa, unidentified
  source 1..224: note = Neosciurus carolinensis
MGGPRPAAVEESPHEIYKTVPAWKREPMRVLSLFGDIGKELTSLGFLETGSEAGRLKHLEDVTDTVRRDVEEWGPFDLVYGSTPALGHSCDRSPGWYLFQFHRLLQYARPRLGSPKPFFWMFVDNLLLTKDDQAIASRFLEMEPVTLQDVHGRVLQNAVRVWTNVPAVKSRHSALASEEELLLVQDGQRGRLPAQGPAALVKHCFLPLREYFKYFSQNTLPLYK

SEQ ID NO: 591 - protein, 213 aa, unidentified
  source 1..213: note = Neosciurus carolinensis
SPHEIYKTVPAWKREPMRVLSLFGDIGKELTSLGFLETGSEAGRLKHLEDVTDTVRRDVEEWGPFDLVYGSTPALGHSCDRSPGWYLFQFHRLLQYARPRLGSPKPFFWMFVDNLLLTKDDQAIASRFLEMEPVTLQDVHGRVLQNAVRVWTNVPAVKSRHSALASEEELLLVQDGQRGRLPAQGPAALVKHCFLPLREYFKYFSQNTLPLYK

SEQ ID NO: 592 - protein, 417 aa, Bison bison
MARSSPGTLNLEIMDGSDPDPALPPDREQWPPPCEILLDPEPEHSLDIILVGSSELSSPPSPGPRRDFIAYEVKVNQRDIEDVCICCGSLQLHTQHPLFEGGMCAPCKDKFLECLFLYDDDGYQSYCSICCAGETLLICENPDCTRCYCFECVDTLVGPGTSGKVHAMSNWVCFLCLPFPRSGLLQRRRKWRTWLKAFYDREAESPLVMYKTVPVWKREPIRVLSLFGDIKKELTSLGFLEDGSKPGRLKHLDDVTNIVRRDIDEWGPFDLTYGSTPTLGHTCDHPPGWYVYQFHRILQYARPLPGSPQPFFWMFVDNLVLTEEDLDVATRFLETDPVTIQDVRGRTVQNAVHVWSNIPAVKSRHSALVSQEELSLLAQDRQRVKSPVQGPATLVKNCFLPLREYFKYFSTELTSSL

SEQ ID NO: 593 - protein, 213 aa, Bison bison
SPLVMYKTVPVWKREPIRVLSLFGDIKKELTSLGFLEDGSKPGRLKHLDDVTNIVRRDIDEWGPFDLTYGSTPTLGHTCDHPPGWYVYQFHRILQYARPLPGSPQPFFWMFVDNLVLTEEDLDVATRFLETDPVTIQDVRGRTVQNAVHVWSNIPAVKSRHSALVSQEELSLLAQDRQRVKSPVQGPATLVKNCFLPLREYFKYFSTELTSSL

SEQ ID NO: 594 - protein, 443 aa, Equus przewalskii
MALSSPGTLSLETLDSWDPDVAGQLDEERWQPSSEIVGRPMAAAPVLDLEEEPSMDIILVDSSELSSPPSPGPSRDMCICCGSFQVHTQHPLFEGGMCAACKDKFLSCLFLYDDDGNQSYCSICCSGETLLICENPDCTRCYCFECVDTLVSPRTSEKVQAMSNWVCFLCLPFPRSGLLQRRRKWRGWLKAFYDQEAVRSRSAWGRRMRSGPHLVGFLWLLVAKCPSALESPLEMYKTVPVWKREPVRVLSLFGDIKKELTTLGFLENGSDPGRLKHLDDVTNTVRRDVEEWGPFDLVYGSTPPLGHACDHPPGWYLFQFHRVLQYARPRPGSPQAFFWMFVDNLVLTEDDRAVATRFLETDPVTIQDVCGRAVRNAVHVWSNIPAVKSRHSALFSQEESFLRAQDRQRAKPPARGPAKLVKNCFLPLREYFKYFSTEFTSSL

SEQ ID NO: 595 - protein, 213 aa, Equus przewalskii
SPLEMYKTVPVWKREPVRVLSLFGDIKKELTTLGFLENGSDPGRLKHLDDVTNTVRRDVEEWGPFDLVYGSTPPLGHACDHPPGWYLFQFHRVLQYARPRPGSPQAFFWMFVDNLVLTEDDRAVATRFLETDPVTIQDVCGRAVRNAVHVWSNIPAVKSRHSALFSQEESFLRAQDRQRAKPPARGPAKLVKNCFLPLREYFKYFSTEFTSSL

SEQ ID NO: 596 - protein, 415 aa, Mus caroli
MGSRETPSSFSKTLETLDLETSDSSSPDADSPLEEQWLKSSPALKEDNVDMVLEDCKEPLSPSSPPTGREMIRYEVKVNRRSIEDICLCCGTLQVYTQHPLFEGGICAPCKDKFLESLFLYDDDGHQSYCTICCSGGTLFICESPDCTRCYCFECVDILVGPGTSERINAMACWVCFLCLPFSRSGLLQRRKRWRHQLKAFHDQEGAGPMEIYKTVSTWKRQPVRVLSLFGNIDKVLKSLGFLESGSGSGGGTLKYVEDVTNVVRRDVEKWGPFDLVYGSTQPLGSSCDRCPGWYMFQFHRILQYALPRQESQRPFFWIFMDNLLMTEDDQETTARFLQTEAVTLQDVRGRDYQNVMRVWSNIPGLKSKHVPLTPKEEEYLQAQVRTRSKLDAQKVDLLVKNCLLPLREYFKYFS

SEQ ID NO: 597 - protein, 208 aa, Mus caroli
GPMEIYKTVSTWKRQPVRVLSLFGNIDKVLKSLGFLESGSGSGGGTLKYVEDVTNVVRRDVEKWGPFDLVYGSTQPLGSSCDRCPGWYMFQFHRILQYALPRQESQRPFFWIFMDNLLMTEDDQETTARFLQTEAVTLQDVRGRDYQNVMRVWSNIPGLKSKHVPLTPKEEEYLQAQVRTRSKLDAQKVDLLVKNCLLPLREYFKYFS

SEQ ID NO: 598 - protein, 387 aa, Pan troglodytes
MAAIPALDPEAEPSMDVILVGSSELSSSISPRTGRDLIAYEVKANQRNIEDICICCGSLQVHTQHPLFEGGICAPCKDKSLDALFLYDDDGYQSYCSICCSGETLLICGNPDCTRCYCFECVDSLVGPGTSGKVHAMSNWVCYLCLPSSRSGLLQRRRKWRSQLKAFYDRESENPLEMFETVPVWRRQPVRVLSLFEDIKKELTSLGFLESGSDPGQLKHVVDVTDTVRKDVEEWGPFDLVYGATPPLGHTCDRPPSWYLFQFHRLLQYARPKPGSPRPFFWMFVDNLVLNKEDLDVASRFLEMEPVTIPDVHGGSLQNAVRVWSNIPAIRSSRHWALVSEEELSLLAQNKQSSKLAAKWPTKLVKNCFLPLREYFKYFSTELTSSL

SEQ ID NO: 599 - protein, 214 aa, Pan troglodytes
NPLEMFETVPVWRRQPVRVLSLFEDIKKELTSLGFLESGSDPGQLKHVVDVTDTVRKDVEEWGPFDLVYGATPPLGHTCDRPPSWYLFQFHRLLQYARPKPGSPRPFFWMFVDNLVLNKEDLDVASRFLEMEPVTIPDVHGGSLQNAVRVWSNIPAIRSSRHWALVSEEELSLLAQNKQSSKLAAKWPTKLVKNCFLPLREYFKYFSTELTSSL

SEQ ID NO: 600 - protein, 391 aa, Homo sapiens
MEPLRVLELYSGVGGMHHALRESCIPAQVVAAIDVNTVANEVYKYNFPHTQLLAKTIEGITLEEFDRLSFDMILMSPPCQPFTRIGRQGDMTDSRTNSFLHILDILPRLQKLPKYILLENVKGFEVSSTRDLLIQTIENCGFQYQEFLLSPTSLGIPNSRLRYFLIAKLQSEPLPFQAPGQVLMEFPKIESVHPQKYAMDVENKIQEKNVEPNISFDGSIQCSGKDAILFKLETAEEIHRKNQQDSDLSVKMLKDFLEDDTDVNQYLLPPKSLLRYALLLDIVQPTCRRSVCFTKGYGSYIEGTGSVLQTAEDVQVENIYKSLTNLSQEEQITKLLILKLRYFTPKEIANLLGFPPEFGFPEKITVKQRYRLLGNSLNVHVVAKLIKILYE

SEQ ID NO: 601 - protein, 353 aa, unidentified
  source 1..353: note = Mycoplasmatales bacterium
MAEWYIPAIVSYQAIHNGFTLNKINHKIELQTMIDYLESKTLSMNSKEPVKRGFWYKKHLDEIRIVYTAVKMSEQEGNIFDVRTLFERGLSDIDLLTYSFPCQDLSQQGKQKGMGRDSQTRSGLLWEIEKALDTSKKEDLPKYLLMENVVALTHKVNAEELDEWMMKLESLGYKNDLRILNAGDFGSSQARRRTFMISTLNEKVELPVGNKKPKSMNKILNDEPTRKDFLPALDKFDLTEYKWTKSNINKAKLINYSTFNSEAYVYDSNFTGPTLTASGANSRIKFEYNGKIRKIGAEEAYAYMGFKKSDYIKVNKLNYLNETKMIYTCGNSISVEVLRSIMTNINNNFKENK

SEQ ID NO: 602 - protein, 398 aa, unidentified
  source 1..398: note = Mycoplasma marinum
MLFLIGTFKYVLIYITKVIRIFEAFAGIGAQRKALRNIKSNYEVSGMAEWYIPAIVSYQAIHNGFTLSRVDKKTKLTEMIKYLESKTLSMDSKEPVRTGYWFKKHKDMVRIVYSAVKLSEAEGNIFDVRTLHERKLEDIDLLTYSFPCQDLSQQGKQRGMKKDSGTRSGLLWEIEKALEATPKDKLPKYLLMENVVALTHKTNKKDLDNWKRKLRSLGYYNDINVLNAGDFGSSQARRRAFMISTLDSKVTLPLGDKKPQAISKILNKETRSQDFMPALDEYEKTDFKRTLSNIKKCKLIDYTSFNSEAYVYDPKYTGPTLTASGANSRIKFTHQGKMRKINAEEAYRYMGFSTNDYKKVNNLNFLSETKMIYTCGNSISVEVLEEIMLKIIREDNNG

SEQ ID NO: 603 - protein, 381 aa, Spiroplasma chinense
MKKIRLFEAFAGIGSQRRALKSVVGNNFEIAGLAEWYVPAIVMYQIINNDFSKKNVLDNVPRDEVIDYLNSKCLSWDSKKPVSKNFWNRKSQDILNVIYSAVKKSEEEGNIFDVRTLHERTLESIDILTYSFPCQDLSQQGIQKGMKKNSGTRSGLLWEIEKAIDNTPKNNLPKILLMENVPALLNKTNELELKEWLIKLENMGYKNSIGILNAADFGSPQARRRVFMISSRNKKIELPVGKSKPGKLNDILEKNVEDKFIMTNLEKYDFSEFSLTKSNIKKCSLINYTKFNSEAYVYDPDFTGPTLTASGANSRIKIYDKGFIRRMSPLESFRYMGFDDEDYKKIDEFEFLTDTQKIFVCGNSISIEVLKAIFERIDSNE

SEQ ID NO: 604 - protein, 395 aa, Mycoplasma penetrans
MNSNKDKIKVIKVFEAFAGIGSQFKALKNIARSKNWEIQHSGMVEWFVDAIVSYVAIHSKNFNPKIEQLDKDILSISNDSKMPISEYGIKKINNTIKASYLNYAKKHFNNLFDIKKVNKDNFPKNIDIFTYSFPCQDLSVQGLQKGIDKELNTRSGLLWEIERILEEIKNSFSKEEMPKYLLMENVKNLLSHKNKKNYNTWLKQLEKFGYKSKTYLLNSKNFDNCQNRERVFCLSIRDDYLEKTGFKFKELEKVKNPPKKIKDILVDSSNYKYLNLNKYETTTFRETKSNIISRSLKNYTTFNSENYVYNINGIGPTLTASGANSRIKIETQQGVRYLTPLECFKYMQFDVNDFKKVQSTNLISENKMIYIAGNSIPVKILEAIFNTLEFVNNEE

SEQ ID NO: 605 - protein, 386 aa, unidentified
  source 1..386: note = S. monobiae
MSKVENKTKKLRVFEAFAGIGAQRKALEKVRKDEYEIVGLAEWYVPAIVMYQAIHNNFHTKLEYKSVSREEMIDYLENKTLSWNSKNPVSNGYWKRKKDDELKIIYNAIKLSEKEGNIFDIRDLYKRTLKNIDLLTYSFPCQDLSQQGIQKGMKRGSGTRSGLLWEIERALDSTEKNDLPKYLLMENVGALLHKKNEEELNQWKQKLESLGYQNSIEVLNAADFGSSQARRRVFMISTLNEFVELPKGDKKPKSIKKVLNKIVSEKDILNNLLKYNLTEFKKTKSNINKASLIGYSKFNSEGYVYDPEFTGPTLTASGANSRIKIKDGSNIRKMNSDETFLYIGFDSQDGKRVNEIEFLTENQKIFVCGNSISVEVLEAIIDKIGG

SEQ ID NO: 606 - protein, 358 aa, Haemophilus parainfluenzae
MKDVLDDNLLEEPAAQYSLFEPESNPNLREKFTFIDLFAGIGGFRIAMQNLGGKCIFSSEWDEQAQKTYEANFGDLPYGDITLEETKAFIPEKFDILCAGFPCQAFSIAGKRGGFEDTRGTLFFDVAEIIRRHQPKAFFLENVKGLKNHDKGRTLKTILNVLREDLGYFVPEPAIVNAKNFGVPQNRERIYIVGFHKSTGVNSFSYPEPLDKIVTFADIREEKTVPTKYYLSTQYIDTLRKHKERHESKGNGFGYEIIPDDGIANAIVVGGMGRERNLVIDHRITDFTPTTNIKGEVNREGIRKMTPREWARLQGFPDSYVIPVSDASAYKQFGNSVAVPAIQATGKKILEKLGNLYD

SEQ ID NO: 607 - protein, 521 aa, unidentified
  source 1..521: note = Arthrobacter luteus
MSKANAKYSFVDLFAGIGGFHAALAATGGVCEYAVEIDREAAAVYERNWNKPALGDITDDANDEGVTLRGYDGPIDVLTGGFPCQPFSKSGAQHGMAETRGTLFWNIARIIEEREPTVLILENVRNLVGPRHRHEWLTIIETLRFFGYEVSGAPAIFSPHLLPAWMGGTPQVRERVFITATLVPERMRDERIPRTETGEIDAEAIGPKPVATMNDRFPIKKGGTELFHPGDRKSGWNLLTSGIIREGDPEPSNVDLRLTETETLWIDAWDDLESTIRRATGRPLEGFPYWADSWTDFRELSRLVVIRGFQAPEREVVGDRKRYVARTDMPEGFVPASVTRPAIDETLPAWKQSHLRRNYDFFERHFAEVVAWAYRWGVYTDLFPASRRKLEWQAQDAPRLWDTVMHFRPSGIRAKRPTYLPALVAITQTSIVGPLERRLSPRETARLQGLPEWFDFGEQRAAATYKQMGNGVNVGVVRHILREHVRRDRALLKLTPAGQRIINAVLADEPDATVGALGAAE

SEQ ID NO: 608 - protein, 330 aa, Haemophilus aegyptius
MNLISLFSGAGGLDLGFQKAGFRIICANEYDKSIWKTYESNHSAKLIKGDISKISSDEFPKCDGIIGGPPCQSWSEGGSLRGIDDPRGKLFYEYIRILKQKKPIFFLAENVKGMMAQRHNKAVQEFIQEFDNAGYDVHIILLNANDYGVAQDRKRVFYIGFRKELNINYLPPIPHLIKPTFKDVIWDLKDNPIPALDKNKTNGNKCIYPNHEYFIGSYSTIFMSRNRVRQWNEPAFTVQASGRQCQLHPQAPVMLKVSKNLNKFVEGKEHLYRRLTVRECARVQGFPDDFIFHYESLNDGYKMIGNAVPVNLAYEIAKTIKSALEICKGN

SEQ ID NO: 609 - protein, 327 aa, Haemophilus haemolyticus
MIEIKDKQLTGLRFIDLFAGLGGFRLALESCGAECVYSNEWDKYAQEVYEMNFGEKPEGDITQVNEKTIPDHDILCAGFPCQAFSISGKQKGFEDSRGTLFFDIARIVREKKPKVVFMENVKNFASHDNGNTLEVVKNTMNELDYSFHAKVLNALDYGIPQKRERIYMICFRNDLNIQNFQFPKPFELNTFVKDLLLPDSEVEHLVIDRKDLVMTNQEIEQTTPKTVRLGIVGKGGQGERIYSTRGIAITLSAYGGGIFAKTGGYLVNGKTRKLHPRECARVMGYPDSYKVHPSTSQAYKQFGNSVVINVLQYIAYNIGSSLNFKPY

SEQ ID NO: 610 - protein, 418 aa, unidentified
  source 1..418: note = Moraxella
MKPEILKLIRSKLDLTQKQASEIIEVSDKTWQQWESGKTEMHPAYYSFLQEKLKDKINFEELSAQKTLQKKIFDKYNQNQITKNAEELAEITHIEERKDAYSSDFKFIDLFSGIGGIRQSFEVNGGKCVFSSEIDPFAKFTYYTNFGVVPFGDITKVEATTIPQHDILCAGFPCQPFSHIGKREGFEHPTQGTMFHEIVRIIETKKTPVLFLENVPGLINHDDGNTLKVIIETLEDMGYKVHHTVLDASHFGIPQKRKRFYLVAFLNQNIHFEFPKPPMISKDIGEVLESDVTGYSISEHLQKSYLFKKDDGKPSLIDKNTTGAVKTLVSTYHKIQRLTGTFVKDGETGIRLLTTNECKAIMGFPKDFVIPVSRTQMYRQMGNSVVVPVVTKIAEQISLALKTVNQQSPQENFELELV

SEQ ID NO: 611 - protein, 537 aa, Ascobolus sp.
MSERRYEAGMTVALHEGSFLKIQRVYIRQYHADNRREHMLVGPLFRRTKYLKALSKKVNEVAIVHESIHVPVQDVIGVRELIITNRPFPECRKGDEHTGRLVCRWVYNLDERAKGREYKKQRYIRRITEAEADPEYRVEDRVLRRRWFQEGYIGDEISYKEHGNGDIVDIRSESPLQVLDGWGGDLVDLENGEETSIPGPCRSASSYGRLMKPPLAQAADSNTSRKYTFGDTFCGGGGVSLGARQAGLEVKWAFDMNPNAGANYRRNFPNTDFFLAEAEQFIQLSVGISQHVDILHLSPPCQTFSRAHTIAGKNDENNEASFFAVVNLIKAVRPRLFTVEETDGIMDRQSRQFIDTALMGITELGYSFRICVLNAIEYGVCQNRKRLIIIGAAPGEELPPFPLPTHQDFFSKDPRRDLLPAVTLDDALSTITPESTDHHLNHVWQPAEWKTPYDAHRPFKNAIRAGGGEYDIYPDGRRKFTVRELACIQGFPDEYEFVGTLTDKRRIIGNAVPPPLSAAIMSTLRQWMTEKDFERME

SEQ ID NO: 612 - protein, 1534 aa, Arabidopsis sp.
MVENGAKAAKRKKRPLPEIQEVEDVPRTRRPRRAAACTSFKEKSIRVCEKSATIEVKKQQIVEEEFLALRLTALETDVEDRPTRRLNDFVLFDSDGVPQPLEMLEIHDIFVSGAILPSDVCTDKEKEKGVRCTSFGRVEHWSISGYEDGSPVIWISTELADYDCRKPAASYRKVYDYFYEKARASVAVYKKLSKSSGGDPDIGLEELLAAVVRSMSSGSKYFSSGAAIIDFVISQGDFIYNQLAGLDETAKKHESSYVEIPVLVALREKSSKIDKPLQRERNPSNGVRIKEVSQVAESEALTSDQLVDGTDDDRRYAILLQDEENRKSMQQPRKNSSSGSASNMFYIKINEDEIANDYPLPSYYKTSEEETDELILYDASYEVQSEHLPHRMLHNWALYNSDLRFISLELLPMKQCDDIDVNIFGSGVVTDDNGSWISLNDPDSGSQSHDPDGMCIFLSQIKEWMIEFGSDDIISISIRTDVAWYRLGKPSKLYAPWWKPVLKTARVGISILTFLRVESRVARLSFADVTKRLSGLQANDKAYISSDPLAVERYLVVHGQIILQLFAVYPDDNVKRCPFVVGLASKLEDRHHTKWIIKKKKISLKELNLNPRAGMAPVASKRKAMQATTTRLVNRIWGEFYSNYSPEDPLQATAAENGEDEVEEEGGNGEEEVEEEGENGLTEDTVPEPVEVQKPHTPKKIRGSSGKREIKWDGESLGKTSAGEPLYQQALVGGEMVAVGGAVTLEVDDPDEMPAIYFVEYMFESTDHCKMLHGRFLQRGSMTVLGNAANERELFLTNECMTTQLKDIKGVASFEIRSRPWGHQYRKKNITADKLDWARALERKVKDLPTEYYCKSLYSPERGGFFSLPLSDIGRSSGFCTSCKIREDEEKRSTIKLNVSKTGFFINGIEYSVEDFVYVNPDSIGGLKEGSKTSFKSGRNIGLRAYVVCQLLEIVPKESRKADLGSFDVKVRRFYRPEDVSAEKAYASDIQELYFSQDTVVLPPGALEGKCEVRKKSDMPLSREYPISDHIFFCDLFFDTSKGSLKQLPANMKPKFSTIKDDTLLRKKKGKGVESEIESEIVKPVEPPKEIRLATLDIFAGCGGLSHGLKKAGVSDAKWAIEYEEPAGQAFKQNHPESTVFVDNCNVILRAIMEKGGDQDDCVSTTEANELAAKLTEEQKSTLPLPGQVDFINGGPPCQGFSGMNRFNQSSWSKVQCEMILAFLSFADYFRPRYFLLENVRTFVSFNKGQTFQLTLASLLEMGYQVRFGILEAGAYGVSQSRKRAFIWAAAPEEVLPEWPEPMHVFGVPKLKISLSQGLHYAAVRSTALGAPFRPITVRDTIGDLPSVENGDSRTNKEYKEVAVSWFQKEIRGNTIALTDHICKAMNELNLIRCKLIPTRPGADWHDLPKRKVTLSDGRVEEMIPFCLPNTAERHNGWKGLYGRLDWQGNFPTSVTDPQPMGKVGMCFHPEQHRILTVRECARSQGFPDSYEFAGNINHKHRQIGNAVPPPLAFALGRKLKEALHLKKSPQHQP

SEQ ID NO: 613 - protein, 1356 aa, Ascobolus sp.
MELTPELSGVSTDLGGGGSIFAHWRMKEESPAPTEILDDLNVLEWEKTTRDYSKEDLRIADQLFSIEDEHQSLPFETADAEDGTPTEEEEEKELPMRTLDNFVLYDASDLELAALDLIGTELNIHAVGTVGPIYTEGEEDEQEDEDEDVSPPVRTGTQATSASVTQMTVELYIRNIVQYEFCFNDDGTVETWIQTTNAHYKLLQPAKCYTSLYRPVNDCLNVITAIITLAPESTTMSLKDLLKVMDDKAQAVSYEEVERMSEFIVQHLDQWMETAPKKKSKLIEKSKVYIDLNNLAGIDMVSGVRPPPVRRVTGRSSAPKKRIVRNMNDAVLLHQNETTVTNWIHQLSAGMFGRALNVLGAETADVENLTCDPASAKFVVPQRRLHKRLKWETRGHIPVSEEEYKHIYQGKKYAKFFEAVRAVDESKLTIKLGDLVYVLDQDPKVTQTQFATAGREGRKKGAEKEKIQVRFGRVLSIRQPDSNSKDAQNVFIHVQWLVLGCDTILQEMASRRELFLTDSCDTVFADVIYGVAKLTPLGAKDIPTVEFHESMATMMGENEFFVRFKYNYQDGSFTDLKDVDAEQIGTLQPRVNTHRNPGYCSNCRIKYDNERTGDKWIYENDTEGEPRLFRSSKGWCIYAQEFVYLQPVEKQPGTTFRVGYISEINKSSVIVELLARVDDDDKSGHISYSDPRHLYFTGTDIKVTFDKIIRKCFVFHDSGDQKAKAPLMYGTLQRDLYYYRYEKRKGKAELVPVREIRSIHEQTLNDWESRTQIERHGAVSGKKLKGLDIFAGCGGLTLGLDLSGAVDTKWDIEFAPSAANTLALNFPDAQVFNQCANVLLSRAIQSEDEGSLDIEYDLQGRVLPDLPKKGEVDFIYGGPPCQGFSGVNRYKKGNDIKNSLVATFLSYVDHYKPRFVLLENVKGLITTKLGNSKNAEGKWEGGISNGVVKFIYRTLISMNYQCRIGLVQSGEYGVPQSRPRVIFLAARMGERLPDLPEPMHAFEVLDSQYALPHIKRYHTTQNGVAPLPRITIGEAVSDLPKFQYANPGVWPRHDPYSSAKAQPSDKTIEKFSVSKATSFVGYLLQPYHSRPQSEFQRRLRTKLVPSDEPAEKTSLLTTKLVTAHVTRLFNKETTQRIVCVPMWPGADHRSLPKEMRPWCLVDPNSQAEKHRFWPGLFGRLGMEDFFSTALTDVQPCGKQGKVLHPTQRRVYTVRELARAQGFPDWFAFTDGDADSGLGGVKKWHRNIGNAVPVPLGEQIGRCIGYSVWWKDDMIAQLREDGADEDEEMIDGNDQWVEELNTQMAADMPGLPLLVTHLLNLCVYRRLYGPNAKEFLPARVYDKKLEGGRRRLVWAML

SEQ ID NO: 614 - protein, 1454 aa, unidentified
  source 1..1454: note = Neurospora
MDSPDRSHGGMFIDVPAETMGFQEDYLDMFASVLSQGLAKEGDYAHHQPLPAGKEECLEPIAVATTITPSPDDPQLQLQLELEQQFQTESGLNGVDPAPAPESEDEADLPDGFSDESPDDDFVVQRSKHITVDLPVSTLINPRSTFQRIDENDNLVPPPQSTPERVAVEDLLKAAKAAGKNKEDYIEFELHDFNFYVNYAYHPQEMRPIQLVATKVLHDKYYFDGVLKYGNTKHYVTGMQVLELPVGNYGASLHSVKGQIWVRSKHNAKKEIYYLLKKPAFEYQRYYQPFLWIADLGKHVVDYCTRMVERKREVTLGCFKSDFIQWASKAHGKSKAFQNWRAQHPSDDFRTSVAANIGYIWKEINGVAGAKRAAGDQLFRELMIVKPGQYFRQEVPPGPVVTEGDRTVAATIVTPYIKECFGHMILGKVLRLAGEDAEKEKEVKLAKRLKIENKNATKADTKDDMKNDTATESLPTPLRSLPVQVLEATPIESDIVSIVSSDLPPSENNPPPLTNGSVKPKAKANPKPKPSTQPLHAAHVKYLSQELVNKIKVGDVISTPRDDSSNTDTKWKPTDTDDHRWFGLVQRVHTAKTKSSGRGLNSKSFDVIWFYRPEDTPCCAMKYKWRNELFLSNHCTCQEGHHARVKGNEVLAVHPVDWFGTPESNKGEFFVRQLYESEQRRWITLQKDHLTCYHNQPPKPPTAPYKPGDTVLATLSPSDKFSDPYEVVEYFTQGEKETAFVRLRKLLRRRKVDRQDAPANELVYTEDLVDVRAERIVGKCIMRCFRPDERVPSPYDRGGTGNMFFITHRQDHGRCVPLDTLPPTLRQGFNPLGNLGKPKLRGMDLYCGGGNFGRGLEEGGVVEMRWANDIWDKAIHTYMANTPDPNKTNPFLGSVDDLLRLALEGKFSDNVPRPGEVDFIAAGSPCPGFSLLTQDKKVLNQVKNQSLVASFASFVDFYRPKYGVLENVSGIVQTFVNRKQDVLSQLFCALVGMGYQAQLILGDAWAHGAPQSRERVFLYFAAPGLPLPDPPLPSHSHYRVKNRNIGFLCNGESYVQRSFIPTAFKFVSAGEGTADLPKIGDGKPDACVRFPDHRLASGITPYIRAQYACIPTHPYGMNFIKAWNNGNGVMSKSDRDLFPSEGKTRTSDASVGWKRLNPKTLFPTVTTTSNPSDARMGPGLHWDEDRPYTVQEMRRAQGYLDEEVLVGRTTDQWKLVGNSVSRHMALAIGLKFREAWLGTLYDESAVVATATATATTAAAVGVTVPVMEEPGIGTTESSRPSRSPVHTAVDLDDSKSERSRSTTPATVLSTSSAAGDGSANAAGLEDDDNDDMEMMEVTRKRSSPAVDEEGMRPSKVQKVEVTVASPASRRSSRQASRNPTASPSSKASKATTHEAPAPEELESDAESYSETYDKEGFDGDYHSGHEDQYSEEDEEEEYAEPETMTVNGMTIVKL

SEQ ID NO: 615 - protein, 345 aa, unidentified
  source 1..345: note = Drosophila
MVFRVLELFSGIGGMHYAFNYAQLDGQIVAALDVNTVANAVYAHNYGSNLVKTRNIQSLSVKEVTKLQANMLLMSPPCQPHTRQGLQRDTEDKRSDALTHLCGLIPECQELEYILMENVKGFESSQARNQFIESLERSGFHWREFILTPTQFNVPNTRYRYYCIARKGADFPFAGGKIWEEMPGAIAQNQGLSQIAEIVEENVSPDFLVPDDVLTKRVLVMDIIHPAQSRSMCFTKGYTHYTEGTGSAYTPLSEDESHRIFELVKEIDTSNQDASKSEKILQQRLDLLHQVRLRYFTPREVARLMSFPENFEFPPETTNRQKYRLLGNSINVKVVGELIKLLTIK

SEQ ID NO: 616 - protein, 330 aa, unidentified
  source 1..330: note = Schizosaccharomyces pombe
MLSTKRLRVLELYSGIGGMHYALNLANIPADIVCAIDINPQANEIYNLNHGKLAKHMDISTLTAKDFDAFDCKLWTMSPSCQPFTRIGNRKDILDPRSQAFLNILNVLPHVNNLPEYILIENVQGFEESKAAEECRKVLRNCGYNLIEGILSPNQFNIPNSRSRWYGLARLNFKGEWSIDDVFQFSEVAQKEGEVKRIRDYLEIERDWSSYMVLESVLNKWGHQFDIVKPDSSSCCCFTRGYTHLVQGAGSILQMSDHENTHEQFERNRMALQLRYFTAREVARLMGFPESLEWSKSNVTEKCMYRLLGNSINVKVVSYLISLLLEPLNF

SEQ ID NO: 617 - protein, 624 aa, Arabidopsis sp.
MVMSHIFLISQIQEVEHGDSDDVNWNTDDDELAIDNFQFSPSPVHISATSPNSIQNRISDETVASFVEMGFSTQMIARAIEETAGANMEPMMILETLFNYSASTEASSSKSKVINHFIAMGFPEEHVIKAMQEHGDEDVGEITNALLTYAEVDKLRESEDMNININDDDDDNLYSLSSDDEEDELNNSSNEDRILQALIKMGYLREDAAIAIERCGEDASMEEVVDFICAAQMARQFDEIYAEPDKKELMNNNKKRRTYTETPRKPNTDQLISLPKEMIGFGVPNHPGLMMHRPVPIPDIARGPPFFYYENVAMTPKGVWAKISSHLYDIVPEFVDSKHFCAAARKRGYIHNLPIQNRFQIQPPQHNTIQEAFPLTKRWWPSWDGRTKLNCLLTCIASSRLTEKIREALERYDGETPLDVQKWVMYECKKWNLVWVGKNKLAPLDADEMEKLLGFPRDHTRGGGISTTDRYKSLGNSFQVDTVAYHLSVLKPLFPNGINVLSLFTGIGGGEVALHRLQIKMNVVVSVEISDANRNILRSFWEQTNQKGILREFKDVQKLDDNTIERLMDEYGGFDLVIGGSPCNNLAGGNRHHRVGLGGEHSSLFFDYCRILEAVRRKARHMRR

SEQ ID NO: 618 - protein, 626 aa, Arabidopsis sp.
MVIWNNDDDDFLEIDNFQSSPRSSPIHAMQCRVENLAGVAVTTSSLSSPTETTDLVQMGFSDEVFATLFDMGFPVEMISRAIKETGPNVETSVIIDTISKYSSDCEAGSSKSKAIDHFLAMGFDEEKVVKAIQEHGEDNMEAIANALLSCPEAKKLPAAVEEEDGIDWSSSDDDTNYTDMLNSDDEKDPNSNENGSKIRSLVKMGFSELEASLAVERCGENVDIAELTDFLCAAQMAREFSEFYTEHEEQKPRHNIKKRRFESKGEPRSSVDDEPIRLPNPMIGFGVPNEPGLITHRSLPELARGPPFFYYENVALTPKGVWETISRHLFEIPPEFVDSKYFCVAARKRGYIHNLPINNRFQIQPPPKYTIHDAFPLSKRWWPEWDKRTKLNCILTCTGSAQLTNRIRVALEPYNEEPEPPKHVQRYVIDQCKKWNLVWVGKNKAAPLEPDEMESILGFPKNHTRGGGMSRTERFKSLGNSFQVDTVAYHLSVLKPIFPHGINVLSLFTGIGGGEVALHRLQIKMKLVVSVEISKVNRNILKDFWEQTNQTGELIEFSDIQHLTNDTIEGLMEKYGGFDLVIGGSPCNNLAGGNRVSRVGLEGDQSSLFFEYCRILEVVRARMRGS

SEQ ID NO: 619 - protein, 791 aa, Arabidopsis sp.
MAARNKQKKRAEPESDLCFAGKPMSVVESTIRWPHRYQSKKTKLQAPTKKPANKGGKKEDEEIIKQAKCHFDKALVDGVLINLNDDVYVTGLPGKLKFIAKVIELFEADDGVPYCRFRWYYRPEDTLIERFSHLVQPKRVFLSNDENDNPLTCIWSKVNIAKVPLPKITSRIEQRVIPPCDYYYDMKYEVPYLNFTSADDGSDASSSLSSDSALNCFENLHKDEKFLLDLYSGCGAMSTGFCMGASISGVKLITKWSVDINKFACDSLKLNHPETEVRNEAAEDFLALLKEWKRLCEKFSLVSSTEPVESISELEDEEVEENDDIDEASTGAELEPGEFEVEKFLGIMFGDPQGTGEKTLQLMVRWKGYNSSYDTWEPYSGLGNCKEKLKEYVIDGFKSHLLPLPGTVYTVCGGPPCQGISGYNRYRNNEAPLEDQKNQQLLVFLDIIDFLKPNYVLMENVVDLLRFSKGFLARHAVASFVAMNYQTRLGMMAAGSYGLPQLRNRVFLWAAQPSEKLPPYPLPTHEVAKKFNTPKEFKDLQVGRIQMEFLKLDNALTLADAISDLPPVTNYVANDVMDYNDAAPKTEFENFISLKRSETLLPAFGGDPTRRLFDHQPLVLGDDDLERVSYIPKQKGANYRDMPGVLVHNNKAEINPRFRAKLKSGKNVVPAYAISFIKGKSKKPFGRLWGDEIVNTVVTRAEPHNQCVIHPMQNRVLSVRENARLQGFPDCYKLCGTIKEKYIQVGNAVAVPVGVALGYAFGMASQGLTDDEPVIKLPFKYPECMQAKDQI

SEQ ID NO: 620 - protein, 1295 aa, Arabidopsis sp.
MLSPAKCESEEAQAPLDLHSSSRSEPECLSLVLWCPNPEEAAPSSTRELIKLPDNGEMSLRRSTTLNCNSPEENGGEGRVSQRKSSRGKSQPLLMLTNGCQLRRSPRFRALHANFDNVCSVPVTKGGVSQRKFSRGKSQPLLTLTNGCQLRRSPRFRAVDGNFDSVCSVPVTGKFGSRKRKSNSALDKKESSDSEGLTFKDIAVIAKSLEMEIISECQYKNNVAEGRSRLQDPAKRKVDSDTLLYSSINSSKQSLGSNKRMRRSQRFMKGTENEGEENLGKSKGKGMSLASCSFRRSTRLSGTVETGNTETLNRRKDCGPALCGAEQVRGTERLVQISKKDHCCEAMKKCEGDGLVSSKQELLVFPSGCIKKTVNGCRDRTLGKPRSSGLNTDDIHTSSLKISKNDTSNGLTMTTALVEQDAMESLLQGKTSACGAADKGKTREMHVNSTVIYLSDSDEPSSIEYLNGDNLTQVESGSALSSGGNEGIVSLDLNNPTKSTKRKGKRVTRTAVQEQNKRSICFFIGEPLSCEEAQERWRWRYELKERKSKSRGQQSEDDEDKIVANVECHYSQAKVDGHTFSLGDFAYIKGEEEETHVGQIVEFFKTTDGESYFRVQWFYRATDTIMERQATNHDKRRLFYSTVMNDNPVDCLISKVTVLQVSPRVGLKPNSIKSDYYFDMEYCVEYSTFQTLRNPKTSENKLECCADVVPTESTESILKKKSFSGELPVLDLYSGCGGMSTGLSLGAKISGVDVVTKWAVDQNTAACKSLKLNHPNTQVRNDAAGDFLQLLKEWDKLCKRYVFNNDQRTDTLRSVNSTKETSGSSSSSDDDSDSEEYEVEKLVDICFGDHDKTGKNGLKFKVHWKGYRSDEDTWELAEELSNCQDAIREFVTSGFKSKILPLPGRVGVICGGPPCQGISGYNRHRNVDSPLNDERNQQIIVFMDIVEYLKPSYVLMENVVDILRMDKGSLGRYALSRLVNMRYQARLGIMTAGCYGLSQFRSRVFMWGAVPNKNLPPFPLPTHDVIVRYGLPLEFERNVVAYAEGQPRKLEKALVLKDAISDLPHVSNDEDREKLPYESLPKTDFQRYIRSTKRDLTGSAIDNCNKRTMLLHDHRPFHINEDDYARVCQIPKRKGANFRDLPGLIVRNNTVCRDPSMEPVILPSGKPLVPGYVFTFQQGKSKRPFARLWWDETVPTVLTVPTCHSQALLHPEQDRVLTIRESARLQGFPDYFQFCGTIKERYCQIGNAVAVSVSRALGYSLGMAFRGLARDEHLIKLPQNFSHSTYPQLQETIPH

SEQ ID NO: 621 - protein, 839 aa, Arabidopsis sp.
MAPKRKRPATKDDTTKSIPKPKKRAPKRAKTVKEEPVTVVEEGEKHVARFLDEPIPESEAKSTWPDRYKPIEVQPPKASSRKKTKDDEKVEIIRARCHYRRAIVDERQIYELNDDAYVQSGEGKDPFICKIIEMFEGANGKLYFTARWFYRPSDTVMKEFEILIKKKRVFFSEIQDTNELGLLEKKLNILMIPLNENTKETIPATENCDFFCDMNYFLPYDTFEAIQQETMMAISESSTISSDTDIREGAAAISEIGECSQETEGHKKATLLDLYSGCGAMSTGLCMGAQLSGLNLVTKWAVDMNAHACKSLQHNHPETNVRNMTAEDFLFLLKEWEKLCIHFSLRNSPNSEEYANLHGLNNVEDNEDVSEESENEDDGEVFTVDKIVGISFGVPKKLLKRGLYLKVRWLNYDDSHDTWEPIEGLSNCRGKIEEFVKLGYKSGILPLPGGVDVVCGGPPCQGISGHNRFRNLLDPLEDQKNKQLLVYMNIVEYLKPKFVLMENVVDMLKMAKGYLARFAVGRLLQMNYQVRNGMMAAGAYGLAQFRLRFFLWGALPSEIIPQFPLPTHDLVHRGNIVKEFQGNIVAYDEGHTVKLADKLLLKDVISDLPAVANSEKRDEITYDKDPTTPFQKFIRLRKDEASGSQSKSKSKKHVLYDHHPLNLNINDYERVCQVPKRKGANFRDFPGVIVGPGNVVKLEEGKERVKLESGKTLVPDYALTYVDGKSCKPFGRLWWDEIVPTVVTRAEPHNQVIIHPEQNRVLSIRENARLQGFPDDYKLFGPPKQKYIQVGNAVAVPVAKALGYALGTAFQGLAVGKDPLLTLPEGFAFMKPTLPSELA

SEQ ID NO: 622 - protein, 142 aa, unidentified
  source 1..142: note = Neurospora
MAEQNPFVIDDEDDVIQIHDEEEVEEEVAEVIDITEDDIEPSELDRAFGSRPKEETLPSLLLRDQGFIVRPGMTVELKAPIGRFAISFVRVNSIVKVRQAHVNNVTIRGHGFTRAKEMNGMLPKQLNECCLVASIDTRDPRP

SEQ ID NO: 623 - protein, 529 aa, Escherichia coli
  source 1..529: note = Strain 12
MNNNDLVAKLWKLCDNLRDGGVSYQNYVNELASLLFLKMCKETGQEAEYLPEGYRWDDLKSRIGQEQLQFYRKMLVHLGEDDKKLVQAVFHNVSTTITEPKQITALVSNMDSLDWYNGAHGKSRDDFGDMYEGLLQKNANETKSGAGQYFTPRPLIKTIIHLLKPQPREVVQDPAAGTAGFLIEADRYVKSQTNDLDDLDGDTQDFQIHRAFIGLELVPGTRRLALMNCLLHDIEGNLDHGGAIRLGNTLGSDGENLPKAHIVATNPPFGSAAGTNITRTFVHPTSNKQLCFMQHIIETLHPGGRAAVVVPDNVLFEGGKGTDIRRDLMDKCHLHTILRLPTGIFYAQGVKTNVLFFTKGTVANPNQDKNCTDDVWVYDLRTNMPSFGKRTPFTDEHLQPFERVYGEDPHGLSPRTEGEWSFNAEETEVADSEENKNTDQHLATSRWRKFSREWIRTAKSDSLDISWLKDKDSIDADSLPEPDVLAAEAMGELVQALSELDALMRELGASDEADLQRQLLEEAFGGVKE

SEQ ID NO: 624 - protein, 464 aa, unidentified
  source 1..464: note = Escherichia coli Strain 12
MSAGKLPEGWVIAPVSTVTTLIRGVTYKKEQAINYLKDDYLPLIRANNIQNGKFDTTDLVFVPKNLVKESQKISPEDIVIAMSSGSKSVVGKSAHQHLPFECSFGAFCGVLRPEKLIFSGFIAHFTKSSLYRNKISSLSAGANINNIKPASFDLINIPIPPLAEQKIIAEKLDTLLAQVDSTKARFEQIPQILKRFRQAVLGGAVNGKLTEKWRNFEPQHSVFKKLNFESILTELRNGLSSKPNESGVGHPILRISSVRAGHVDQNDIRFLECSESELNRHKLQDGDLLFTRYNGSLEFVGVCGLLKKLQHQNLLYPDKLIRARLTKDALPEYIEIFFSSPSARNAMMNCVKTTSGQKGISGKDIKSQVVLLPPVKEQAEIVRRVEQLFAYADTIEKQVNNALARVNNLTQSILAKAFRGELTAQWRAENPDLISGENSAAALLEKIKAERAASGGKKASRKKS

SEQ ID NO: 625 - protein, 421 aa, Thermus aquaticus
MGLPPLLSLPSNSAPRSLGRVETPPEVVDFMVSLAEAPRGGRVLEPACAHGPFLRAFREAHGTAYRFVGVEIDPKALDLPPWAEGILADFLLWEPGEAFDLILGNPPYGIVGEASKYPIHVFKAVKDLYKKAFSTWKGKYNLYGAFLEKAVRLLKPGGVLVFVVPATWLVLEDFALLREFLAREGKTSVYYLGEVFPQKKVSAVVIRFQKSGKGLSLWDTQESESGFTPILWAEYPHWEGEIIRFETEETRKLEISGMPLGDLFHIRFAARSPEFKKHPAVRKEPGPGLVPVLTGRNLKPGWVDYEKNHSGLWMPKERAKELRDFYATPHLVVAHTKGTRVVAAWDERAYPWREEFHLLPKEGVRLDPSSLVQWLNSEAMQKHVRTLYRDFVPHLTLRMLERLPVRREYGFHTSPESARNF

SEQ ID NO: 626 - protein, 278 aa, Escherichia coli
MKKNRAFLKWAGGKYPLLDDIKRHLPKGECLVEPFVGAGSVFLNTDFSRYILADINSDLISLYNIVKMRTDEYVQAARELFVPETNCAEVYYQFREEFNKSQDPFRRAVLFLYLNRYGYNGLCRYNLRGEFNVPFGRYKKPYFPEAELYHFAEKAQNAFFYCESYADSMARADDASVVYCDPPYAPLSATANFTAYHTNSFTLEQQAHLAEIAEGLVERHIPVLISNHDTMLTREWYQRAKLHVVKVRRSISSNGGTRKKVDELLALYKPGVVSPAKK

SEQ ID NO: 627 - protein, 358 aa, unidentified
  source 1..358: note = Caulobacter crescentus
MKFGPETIIHGDCIEQMNALPEKSVDLIFADPPYNLQLGGDLLRPDNSKVDAVDDHWDQFESFAAYDKFTREWLKAARRVLKDDGAIWVIGSYHNIFRVGVAVQDLGFWILNDIVWRKSNPMPNFKGTRFANAHETLIWASKSQNAKRYTFNYDALKMANDEVQMRSDWTIPLCTGEERIKGADGQKAHPTQKPEALLYRVILSTTKPGDVILDPFFGVGTTGAAAKRLGRKFIGIEREAEYLEHAKARIAKVVPIAPEDLDVMGSKRAEPRVPFGTIVEAGLLSPGDTLYCSKGTHVAKVRPDGSITVGDLSGSIHKIGALVQSAPACNGWTYWHFKTDAGLAPIDVLRAQVRAGMN

SEQ ID NO: 628 - protein, 577 aa, unidentified
  source 1..577: note = Clostridioides difficile
MDDISQDNFLLSKEYENSLDVDTKKASGIYYTPKIIVDYIVKKTLKNHDIIKNPYPRILDISCGCGNFLLEVYDILYDLFEENIYELKKKYDENYWTVDNIHRHILNYCIYGADIDEKAISILKDSLTNKKVVNDLDESDIKINLFCCDSLKKKWRYKFDYIVGNPPYIGHKKLEKKYKKFLLEKYSEVYKDKADLYFCFYKKIIDILKQGGIGSVITPRYFLESLSGKDLREYIKSNVNVQEIVDFLGANIFKNIGVSSCILTFDKKKTKETYIDVFKIKNEDICINKFETLEELLKSSKFEHFNINQRLLSDEWILVNKDDETFYNKIQEKCKYSLEDIAISFQGIITGCDKAFILSKDDVKLNLVDDKFLKCWIKSKNINKYIVDKSEYRLIYSNDIDNENTNKRILDEIIGLYKTKLENRRECKSGIRKWYELQWGREKLFFERKKIMYPYKSNENRFAIDYDNNFSSADVYSFFIKEEYLDKFSYEYLVGILNSSVYDKYFKITAKKMSKNIYDYYPNKVMKIRIFRDNNYEEIENLSKQIISILLNKSIDKGKVEKLQIKMDNLIMDSLGI

SEQ ID NO: 629 - protein, 835 aa, Synthetic construct
MAASAAAASAAAASAASGSPGPGEGSAGGEKRSTAPSAAASASASAAASSPAGGGAEALELLEHCGVCRERLRPEREPRLLPCLHSACSACLGPAAPAAANSSGDGGAAGDGTVVDCPVCKQQCFSKDIVENYFMRDSGSKAATDAQDANQCCTSCEDNAPATSYCVECSEPLCETCVEAHQRVKYTKDHTVRSTGPAKSRDGERTVYCNVHKHEPLVLFCESCDTLTCRDCQLNAHKDHQYQFLEDAVRNQRKLLASLVKRLGDKHATLQKSTKEVRSSIRQVSDVQKRVQVDVKMAILQIMKELNKRGRVLVNDAQKVTEGQQERLERQHWTMTKIQKHQEHILRFASWALESDNNTALLLSKKLIYFQLHRALKMIVDPVEPHGEMKFQWDLNAWTKSAEAFGKIVAERPGTNSTGPAPMAPPRAPGPLSKQGSGSSQPMEVQEGYGFGSGDDPYSSAEPHVSGVKRSRSGEGEVSGLMRKVPRVSLERLDLDLTADSQPPVFKVFPGSTTEDYNLIVIERGAAAAATGQPGTAPAGTPGAPPLAGMAIVKEEETEAAIGAPPTATEGPETKPVLMALAEGPGAEGPRLASPSGSTSSGLEVVAPEGTSAPGGGPGTLDDSATICRVCQKPGDLVMCNQCEFCFHLDCHLPALQDVPGEEWSCSLCHVLPDLKEEDGSLSLDGADSTGVVAKLSPANQRKCERVLLALFCHEPCRPLHQLATDSTFSLDQPGGTLDLTLIRARLQEKLSPPYSSPQEFAQDVGRMFKQFNKLTEDKADVQSIIGLQRFFETRMNEAFGDTKFSAVLVEPPPMSLPGAGLSSQELSGGPGDGP

SEQ ID NO: 630 - protein, 486 aa, Synthetic construct
MVAGMLGLREEKSEDQDLQGLKDKPLKFKKVKKDKKEEKEGKHEPVQPSAHHSAEPAEAGKAETSEGSGSAPAVPEASASPKQRRSIIRDRGPMYDDPTLPEGWTRKLKQRKSGRSAGKYDVYLINPQGKAFRSKVELIAYFEKVGDTSLDPNDFDFTVTGRGSPSRREQKPPKKPKSPKAPGTGRGRGRPKGSGTTRPKAATSEGVQVKRVLEKSPGKLLVKMPFQTSPGGKAEGGGATTSTQVMVIKRPGRKRKAEADPQAIPKKRGRKPGSVVAAAAAEAKKKAVKESSIRSVQETVLPIKKRKTRETVSIEVKEVVKPLLVSTLGEKSGKGLKTCKSPGRKSKESSPKGRSSSASSPPKKEHHHHHHHSESPKAPVPLLPPLPPPPPEPESSEDPTSPPEPQDLSSSVCKEEKMPRGGSLESDGCPKEPAKTQPAVATAATAAEKYKHRGEGERKDIVSSSMPRPNREEPVDSRTPVTERVS

SEQ ID NO: 631 - protein, 4 aa, Synthetic construct
SGGS

SEQ ID NO: 632 - protein, 24 aa, Synthetic construct
SGGSSGSETPGTSESATPESSGGS

SEQ ID NO: 633 - protein, 32 aa, Synthetic construct
SGGSSGGSSGSETPGTSESATPESSGGSSGGS

SEQ ID NO: 634 - protein, 104 aa, Synthetic construct
GGSGGSPGSPAGSPTSTEEGTSESATPESGPGTSTEPSEGSAPGSPAGSPTSTEEGTSTEPSEGSAPGTSTEPSEGSAPGTSESATPESGPGSEPATSGGSGGS

SEQ ID NO: 635 - protein, 5 aa, Synthetic construct
GSGGG

SEQ ID NO: 636 - protein, 20 aa, Synthetic construct
GGGGSGGGGSGGGGSGGGGS

SEQ ID NO: 637 - protein, 27 aa, Synthetic construct
SSGNSNANSRGPSFSSGLVPLSLRGSH

SEQ ID NO: 638 - protein, 16 aa, Synthetic construct
SGSETPGTSESATPES

SEQ ID NO: 639 - protein, 24 aa, Synthetic construct
SGGSSGGSSGSETPGTSESATPES

SEQ ID NO: 640 - protein, 40 aa, Synthetic construct
SGGSSGGSSGSETPGTSESATPESSGGSSGGSSGGSSGGS

SEQ ID NO: 641 - protein, 64 aa, Synthetic construct
SGGSSGGSSGSETPGTSESATPESSGGSSGGSSGGSSGGSSGSETPGTSESATPESSGGSSGGS

SEQ ID NO: 642 - protein, 92 aa, Synthetic construct
PGSPAGSPTSTEEGTSESATPESGPGTSTEPSEGSAPGSPAGSPTSTEEGTSTEPSEGSAPGTSTEPSEGSAPGTSESATPESGPGSEPATS

SEQ ID NO: 643 - protein, 80 aa, Synthetic construct
GGPSSGAPPPSGGSPAGSPTSTEEGTSESATPESGPGTSTEPSEGSAPGSPAGSPTSTEEGTSTEPSEGSAPGTSTEPSE

SEQ ID NO: 644 - protein, 7 aa, Synthetic construct
PKKKRKV

SEQ ID NO: 645 - protein, 20 aa, Synthetic construct
AVKRPAATKKAGQAKKKKLD

SEQ ID NO: 646 - protein, 25 aa, Synthetic construct
MSRRRKANPTKLSENAKKLAKEVEN

SEQ ID NO: 647 - protein, 9 aa, Synthetic construct
PAAKRVKLD

SEQ ID NO: 648 - protein, 9 aa, Synthetic construct
KLKIKRPVK

SEQ ID NO: 649 - protein, 30 aa, Synthetic construct
MDSLLMNRRKFLYQFKNVRWAKGRRETYLC

SEQ ID NO: 650 - protein, 177 aa, Synthetic construct
  MOD_RES 58..59: note = linker
  MOD_RES 109..111: note = linker
  VARIANT 47..53: note = amino acids of the ZF recognition helix
  VARIANT 70..76: note = amino acids of the ZF recognition helix
  VARIANT 98..104: note = amino acids of the ZF recognition helix
  VARIANT 122..128: note = amino acids of the ZF recognition helix
  VARIANT 150..156: note = amino acids of the ZF recognition helix
  VARIANT 55..56: note = may be threonine-arginine, leucine-arginine or leucine-lysine
  VARIANT 78..79: note = may be threonine-arginine, leucine-arginine or leucine-lysine
  VARIANT 106..107: note = may be threonine-arginine, leucine-arginine or leucine-lysine
  VARIANT 130..131: note = may be threonine-arginine, leucine-arginine or leucine-lysine
  VARIANT 158..159: note = may be threonine-arginine, leucine-arginine or leucine-lysine
SRPGERPFQCRICMRNFSXXXXXXXHXXTHTGEKPFQCRICMRNFSXXXXXXXHXXTHLINKERFQCRICMRNFSXXXXXXXHXXTHTGEKPFQCRICMRNFSXXXXXXXHXXTHLINKERPFQCRICMRNFSXXXXXXXHXXTHTGEKPFQCRICMRNFSXXXXXXXHXXTHLRGS

SEQ ID NO: 651 - protein, 6 aa, Synthetic construct
TGSQKP

SEQ ID NO: 652 - protein, 9 aa, Synthetic construct
TGGGGSQKP

SEQ ID NO: 653 - RNA, 93 nt, Synthetic construct
  source 1..93: mol_type = other RNA
gtttaagagctatgctggaaacagcatagcaagtttaaataaggctagtccgttatcaacttgaaaaagtggcaccgagtcggtgcttttttt

SEQ ID NO: 654 - RNA, 80 nt, Synthetic construct
  source 1..80: mol_type = other RNA
gttttagagctagaaatagcaagttaaaataaggctagtccgttatcaacttgaaaaagtggcaccgagtcggtgctttt

SEQ ID NO: 655 - RNA, 92 nt, Synthetic construct
  source 1..92: mol_type = other RNA
gtttaagagctaagctggaaacagcatagcaagtttaaataaggctagtccgttatcaacttgaaaaagtggcaccgagtcggtgctttttt

SEQ ID NO: 656 - RNA, 93 nt, Synthetic construct
  source 1..93: mol_type = other RNA
gtttaagagctaagctggaaacagcatagcaagtttaaataaggctagtccgttatcaacttgaaaaagtggcaccgagtcggtgcttttttt

SEQ ID NO: 657 - protein, 7 aa, Synthetic construct
  VARIANT 2: note = may be repeated between 2 and 4 times
  VARIANT 4: note = may be repeated 12 times
  VARIANT 6: note = may be repeated between 3 and 5 times
CXCXHXH

SEQ ID NO: 658 - protein, 2087 aa, Synthetic construct
MNHDQEFDPPKVYPPVPAEKRKPIRVLSLFDGIATGLLVLKDLGIQVDRYIASEVCEDSITVGMVRHQGKIMYVGDVRSVTQKHIQEWGPFDLVIGGSPCNDLSIVNPARKGLYEGTGRLFFEFYRLLHDARPKEGDDRPFFWLFENVVAMGVSDKRDISRFLESNPVMIDAKEVSAAHRARYFWGNLPGMNRPLASTVNDKLELQECLEHGRIAKFSKVRTITTRSNSIKQGKDQHFPVFMNEKEDILWCTEMERVFGFPVHYTDVSNMSRLARQRLLGRSWSVPVIRHLFAPLKEYFACVSSGNSNANSRGPSFSSGLVPLSLRGSHMGPMEIYKTVSAWKRQPVRVLSLFRNIDKVLKSLGFLESGSGSGGGTLKYVEDVTNVVRRDVEKWGPFDLVYGSTQPLGSSCDRCPGWYMFQFHRILQYALPRQESQRPFFWIFMDNLLLTEDDQETTTRFLQTEAVTLQDVRGRDYQNAMRVWSNIPGLKSKHAPLTPKEEEYLQAQVRSRSKLDAPKVDLLVKNCLLPLREYFKYFSQNSLPLGGPSSGAPPPSGGSPAGSPTSTEEGTSESATPESGPGTSTEPSEGSAPGSPAGSPTSTEEGTSTEPSEGSAPGTSTEPSEPKKKRKVYMDKKYSIGLAIGTNSVGWAVITDEYKVPSKKFKVLGNTDRHSIKKNLIGALLFDSGETAEATRLKRTARRRYTRRKNRICYLQEIFSNEMAKVDDSFFHRLEESFLVEEDKKHERHPIFGNIVDEVAYHEKYPTIYHLRKKLVDSTDKADLRLIYLALAHMIKFRGHFLIEGDLNPDNSDVDKLFIQLVQTYNQLFEENPINASGVDAKAILSARLSKSRRLENLIAQLPGEKKNGLFGNLIALSLGLTPNFKSNFDLAEDAKLQLSKDTYDDDLDNLLAQIGDQYADLFLAAKNLSDAILLSDILRVNTEITKAPLSASMIKRYDEHHQDLTLLKALVRQQLPEKYKEIFFDQSKNGYAGYIDGGASQEEFYKFIKPILEKMDGTEELLVKLNREDLLRKQRTFDNGSIPHQIHLGELHAILRRQEDFYPFLKDNREKIEKILTFRIPYYVGPLARGNSRFAWMTRKSEETITPWNFEEVVDKGASAQSFIERMTNFDKNLPNEKVLPKHSLLYEYFTVYNELTKVKYVTEGMRKPAFLSGEQKKAIVDLLFKTNRKVTVKQLKEDYFKKIECFDSVEISGVEDRFNASLGTYHDLLKIIKDKDFLDNEENEDILEDIVLTLTLFEDREMIEERLKTYAHLFDDKVMKQLKRRRYTGWGRLSRKLINGIRDKQSGKTILDFLKSDGFANRNFMQLIHDDSLTFKEDIQKAQVSGQGDSLHEHIANLAGSPAIKKGILQTVKVVDELVKVMGRHKPENIVIEMARENQTTQKGQKNSRERMKRIEEGIKELGSQILKEHPVENTQLQNEKLYLYYLQNGRDMYVDQELDINRLSDYDVDAIVPQSFLKDDSIDNKVLTRSDKNRGKSDNVPSEEVVKKMKNYWRQLLNAKLITQRKFDNLTKAERGGLSELDKAGFIKRQLVETRQITKHVAQILDSRMNTKYDENDKLIREVKVITLKSKLVSDFRKDFQFYKVREINNYHHAHDAYLNAVVGTALIKKYPKLESEFVYGDYKVYDVRKMIAKSEQEIGKATAKYFFYSNIMNFFKTEITLANGEIRKRPLIETNGETGEIVWDKGRDFATVRKVLSMPQVNIVKKTEVQTGGFSKESILPKRNSDKLIARKKDWDPKKYGGFDSPTVAYSVLVVAKVEKGKSKKLKSVKELLGITIMERSSFEKNPIDFLEAKGYKEVKKDLIIKLPKYSLFELENGRKRMLASAGELQKGNELALPSKYVNFLYLASHYEKLKGSPEDNEQKQLFVEQHKHYLDEIIEQISEFSKRVILADANLDKVLSAYNKHRDKPIREQAENIIHLFTLTNLGAPAAFKYFDTTIDRKRYTSTKEVLDATLIHQSITGLYETRIDLSQLGGDPKKKRKVSGSETPGTSESATPESTGRTLVTFKDVFVDFTREEWKLLDTAQQIVYRNVMLENYKNLVSLGYQLTKPDVILRLEKGEEP

SEQ ID NO: 659 - protein, 897 aa, Synthetic construct
MNHDQEFDPPKVYPPVPAEKRKPIRVLSLFDGIATGLLVLKDLGIQVDRYIASEVCEDSITVGMVRHQGKIMYVGDVRSVTQKHIQEWGPFDLVIGGSPCNDLSIVNPARKGLYEGTGRLFFEFYRLLHDARPKEGDDRPFFWLFENVVAMGVSDKRDISRFLESNPVMIDAKEVSAAHRARYFWGNLPGMNRPLASTVNDKLELQECLEHGRIAKFSKVRTITTRSNSIKQGKDQHFPVFMNEKEDILWCTEMERVFGFPVHYTDVSNMSRLARQRLLGRSWSVPVIRHLFAPLKEYFACVSSGNSNANSRGPSFSSGLVPLSLRGSHMGPMEIYKTVSAWKRQPVRVLSLFRNIDKVLKSLGFLESGSGSGGGTLKYVEDVTNVVRRDVEKWGPFDLVYGSTQPLGSSCDRCPGWYMFQFHRILQYALPRQESQRPFFWIFMDNLLLTEDDQETTTRFLQTEAVTLQDVRGRDYQNAMRVWSNIPGLKSKHAPLTPKEEEYLQAQVRSRSKLDAPKVDLLVKNCLLPLREYFKYFSQNSLPLGGPSSGAPPPSGGSPAGSPTSTEEGTSESATPESGPGTSTEPSEGSAPGSPAGSPTSTEEGTSTEPSEGSAPGTSTEPSEPKKKRKVYSRPGERPFQCRICMRNFSXXXXXXXHXXTHTGEKPFQCRICMRNFSXXXXXXXHXXTHLINKERPFQCRICMRNFSXXXXXXXHXXTHTGEKPFQCRICMRNFSXXXXXXXHXXTHLINKERPFQCRICMRNFSXXXXXXXHXXTHTGEKPFQCRICMRNFSXXXXXXXHXXTHLRGSPKKKRKVSGSETPGTSESATPESTGRTLVTFKDVFVDFTREEWKLLDTAQQIVYRNVMLENYKNLVSLGYQLTKPDVILRLEKGEEP

SEQ ID NO: 660 - protein, 2298 aa, Synthetic construct
MGTMPKKKRKVPKKKRKVYNHDQEFDPPKVYPPVPAEKRKPIRVLSLFDGIATGLLVLKDLGIQVDRYIASEVCEDSITVGMVRHQGKIMYVGDVRSVTQKHIQEWGPFDLVIGGSPCNDLSIVNPARKGLYEGTGRLFFEFYRLLHDARPKEGDDRPFFWLFENVVAMGVSDKRDISRFLESNPVMIDAKEVSAAHRARYFWGNLPGMNRPLASTVNDKLELQECLEHGRIAKFSKVRTITTRSNSIKQGKDQHFPVFMNEKEDILWCTEMERVFGFPVHYTDVSNMSRLARQRLLGRSWSVPVIRHLFAPLKEYFACVSSGNSNANSRGPSFSSGLVPLSLRGSHMAAIPALDPEAEPSMDVILVGSSELSSSVSPGTGRDLIAYEVKANQRNIEDICICCGSLQVHTQHPLFEGGICAPCKDKFLDALFLYDDDGYQSYCSICCSGETLLICGNPDCTRCYCFECVDSLVGPGTSGKVHAMSNWVCYLCLPSSRSGLLQRRRKWRSQLKAFYDRESENPLEMFETVPVWRRQPVRVLSLFEDIKKELTSLGFLESGSDPGQLKHVVDVTDTVRKDVEEWGPFDLVYGATPPLGHTCDRPPSWYLFQFHRLLQYARPKPGSPRPFFWMFVDNLVLNKEDLDVASRFLEMEPVTIPDVHGGSLQNAVRVWSNIPAIRSRHWALVSEEELSLLAQNKQSSKLAAKWPTKLVKNCFLPLREYFKYFSTELTSSLGGPSSGAPPPSGGSPAGSPTSTEEGTSESATPESGPGTSTEPSEGSAPGSPAGSPTSTEEGTSTEPSEGSAPGTSTEPSELEDKKYSIGLAIGTNSVGWAVITDEYKVPSKKFKVLGNTDRHSIKKNLIGALLFDSGETAEATRLKRTARRRYTRRKNRICYLQEIFSNEMAKVDDSFFHRLEESFLVEEDKKHERHPIFGNIVDEVAYHEKYPTIYHLRKKLVDSTDKADLRLIYLALAHMIKFRGHFLIEGDLNPDNSDVDKLFIQLVQTYNQLFEENPINASGVDAKAILSARLSKSRRLENLIAQLPGEKKNGLFGNLIALSLGLTPNFKSNFDLAEDAKLQLSKDTYDDDLDNLLAQIGDQYADLFLAAKNLSDAILLSDILRVNTEITKAPLSASMIKRYDEHHQDLTLLKALVRQQLPEKYKEIFFDQSKNGYAGYIDGGASQEEFYKFIKPILEKMDGTEELLVKLNREDLLRKQRTFDNGSIPHQIHLGELHAILRRQEDFYPFLKDNREKIEKILTFRIPYYVGPLARGNSRFAWMTRKSEETITPWNFEEVVDKGASAQSFIERMTNFDKNLPNEKVLPKHSLLYEYFTVYNELTKVKYVTEGMRKPAFLSGEQKKAIVDLLFKTNRKVTVKQLKEDYFKKIECFDSVEISGVEDRFNASLGTYHDLLKIIKDKDFLDNEENEDILEDIVLTLTLFEDREMIEERLKTYAHLFDDKVMKQLKRRRYTGWGRLSRKLINGIRDKQSGKTILDFLKSDGFANRNFMQLIHDDSLTFKEDIQKAQVSGQGDSLHEHIANLAGSPAIKKGILQTVKVVDELVKVMGRHKPENIVIEMARENQTTQKGQKNSRERMKRIEEGIKELGSQILKEHPVENTQLQNEKLYLYYLQNGRDMYVDQELDINRLSDYDVDAIVPQSFLKDDSIDNKVLTRSDKNRGKSDNVPSEEVVKKMKNYWRQLLNAKLITQRKFDNLTKAERGGLSELDKAGFIKRQLVETRQITKHVAQILDSRMNTKYDENDKLIREVKVITLKSKLVSDFRKDFQFYKVREINNYHHAHDAYLNAVVGTALIKKYPKLESEFVYGDYKVYDVRKMIAKSEQEIGKATAKYFFYSNIMNFFKTEITLANGEIRKRPLIETNGETGEIVWDKGRDFATVRKVLSMPQVNIVKKTEVQTGGFSKESILPKRNSDKLIARKKDWDPKKYGGFDSPTVAYSVLVVAKVEKGKSKKLKSVKELLGITIMERSSFEKNPIDFLEAKGYKEVKKDLIIKLPKYSLFELENGRKRMLASAGELQKGNELALPSKYVNFLYLASHYEKLKGSPEDNEQKQLFVEQHKHYLDEIIEQISEFSKRVILADANLDKVLSAYNKHRDKPIREQAENIIHLFTLTNLGAPAAFKYFDTTIDRKRYTSTKEVLDATLIHQSITGLYETRIDLSQLGGDSPKKKRKVGVDGSSGSETPGTSESATPESRTLVTFKDVFVDFTREEWKLLDTAQQIVYRNVMLENYKNLVSLGYQLTKPDVILRLEKGEEPSADYKDDDDKAPKKKRKVPKKKRKV

SEQ ID NO: 661 - protein, 2318 aa, Synthetic construct
MGTMPKKKRKVPKKKRKVYNHDQEFDPPKVYPPVPAEKRKPIRVLSLFDGIATGLLVLKDLGIQVDRYIASEVCEDSITVGMVRHQGKIMYVGDVRSVTQKHIQEWGPFDLVIGGSPCNDLSIVNPARKGLYEGTGRLFFEFYRLLHDARPKEGDDRPFFWLFENVVAMGVSDKRDISRFLESNPVMIDAKEVSAAHRARYFWGNLPGMNRPLASTVNDKLELQECLEHGRIAKFSKVRTITTRSNSIKQGKDQHFPVFMNEKEDILWCTEMERVFGFPVHYTDVSNMSRLARQRLLGRSWSVPVIRHLFAPLKEYFACVSSGNSNANSRGPSFSSGLVPLSLRGSHMAAIPALDPEAEPSMDVILVGSSELSSSVSPGTGRDLIAYEVKANQRNIEDICICCGSLQVHTQHPLFEGGICAPCKDKFLDALFLYDDDGYQSYCSICCSGETLLICGNPDCTRCYCFECVDSLVGPGTSGKVHAMSNWVCYLCLPSSRSGLLQRRRKWRSQLKAFYDRESENPLEMFETVPVWRRQPVRVLSLFEDIKKELTSLGFLESGSDPGQLKHVVDVTDTVRKDVEEWGPFDLVYGATPPLGHTCDRPPSWYLFQFHRLLQYARPKPGSPRPFFWMFVDNLVLNKEDLDVASRFLEMEPVTIPDVHGGSLQNAVRVWSNIPAIRSRHWALVSEEELSLLAQNKQSSKLAAKWPTKLVKNCFLPLREYFKYFSTELTSSLGGPSSGAPPPSGGSPAGSPTSTEEGTSESATPESGPGTSTEPSEGSAPGSPAGSPTSTEEGTSTEPSEGSAPGTSTEPSELEDKKYSIGLAIGTNSVGWAVITDEYKVPSKKFKVLGNTDRHSIKKNLIGALLFDSGETAEATRLKRTARRRYTRRKNRICYLQEIFSNEMAKVDDSFFHRLEESFLVEEDKKHERHPIFGNIVDEVAYHEKYPTIYHLRKKLVDSTDKADLRLIYLALAHMIKFRGHFLIEGDLNPDNSDVDKLFIQLVQTYNQLFEENPINASGVDAKAILSARLSKSRRLENLIAQLPGEKKNGLFGNLIALSLGLTPNFKSNFDLAEDAKLQLSKDTYDDDLDNLLAQIGDQYADLFLAAKNLSDAILLSDILRVNTEITKAPLSASMIKRYDEHHQDLTLLKALVRQQLPEKYKEIFFDQSKNGYAGYIDGGASQEEFYKFIKPILEKMDGTEELLVKLNREDLLRKQRTFDNGSIPHQIHLGELHAILRRQEDFYPFLKDNREKIEKILTFRIPYYVGPLARGNSRFAWMTRKSEETITPWNFEEVVDKGASAQSFIERMTNFDKNLPNEKVLPKHSLLYEYFTVYNELTKVKYVTEGMRKPAFLSGEQKKAIVDLLFKTNRKVTVKQLKEDYFKKIECFDSVEISGVEDRFNASLGTYHDLLKIIKDKDFLDNEENEDILEDIVLTLTLFEDREMIEERLKTYAHLFDDKVMKQLKRRRYTGWGRLSRKLINGIRDKQSGKTILDFLKSDGFANRNFMQLIHDDSLTFKEDIQKAQVSGQGDSLHEHIANLAGSPAIKKGILQTVKVVDELVKVMGRHKPENIVIEMARENQTTQKGQKNSRERMKRIEEGIKELGSQILKEHPVENTQLQNEKLYLYYLQNGRDMYVDQELDINRLSDYDVDAIVPQSFLKDDSIDNKVLTRSDKNRGKSDNVPSEEVVKKMKNYWRQLLNAKLITQRKFDNLTKAERGGLSELDKAGFIKRQLVETRQITKHVAQILDSRMNTKYDENDKLIREVKVITLKSKLVSDFRKDFQFYKVREINNYHHAHDAYLNAVVGTALIKKYPKLESEFVYGDYKVYDVRKMIAKSEQEIGKATAKYFFYSNIMNFFKTEITLANGEIRKRPLIETNGETGEIVWDKGRDFATVRKVLSMPQVNIVKKTEVQTGGFSKESILPKRNSDKLIARKKDWDPKKYGGFDSPTVAYSVLVVAKVEKGKSKKLKSVKELLGITIMERSSFEKNPIDFLEAKGYKEVKKDLIIKLPKYSLFELENGRKRMLASAGELQKGNELALPSKYVNFLYLASHYEKLKGSPEDNEQKQLFVEQHKHYLDEIIEQISEFSKRVILADANLDKVLSAYNKHRDKPIREQAENIIHLFTLTNLGAPAAFKYFDTTIDRKRYTSTKEVLDATLIHQSITGLYETRIDLSQLGGDSPKKKRKVGVDGSSGSETPGTSESATPESTGNKKLEAVGTGIEPKAMSQGLVTFGDVAVDFSQEEWEWLNPIQRNLYRKVMLENYRNLASLGLCVSKPDVISSLEQGKEPWSADYKDDDDKAPKKKRKVPKKKRKV

SEQ ID NO: 662 - protein, 2318 aa, Synthetic construct
MGTMPKKKRKVPKKKRKVYNHDQEFDPPKVYPPVPAEKRKPIRVLSLFDGIATGLLVLKDLGIQVDRYIASEVCEDSITVGMVRHQGKIMYVGDVRSVTQKHIQEWGPFDLVIGGSPCNDLSIVNPARKGLYEGTGRLFFEFYRLLHDARPKEGDDRPFFWLFENVVAMGVSDKRDISRFLESNPVMIDAKEVSAAHRARYFWGNLPGMNRPLASTVNDKLELQECLEHGRIAKFSKVRTITTRSNSIKQGKDQHFPVFMNEKEDILWCTEMERVFGFPVHYTDVSNMSRLARQRLLGRSWSVPVIRHLFAPLKEYFACVSSGNSNANSRGPSFSSGLVPLSLRGSHMAAIPALDPEAEPSMDVILVGSSELSSSVSPGTGRDLIAYEVKANQRNIEDICICCGSLQVHTQHPLFEGGICAPCKDKFLDALFLYDDDGYQSYCSICCSGETLLICGNPDCTRCYCFECVDSLVGPGTSGKVHAMSNWVCYLCLPSSRSGLLQRRRKWRSQLKAFYDRESENPLEMFETVPVWRRQPVRVLSLFEDIKKELTSLGFLESGSDPGQLKHVVDVTDTVRKDVEEWGPFDLVYGATPPLGHTCDRPPSWYLFQFHRLLQYARPKPGSPRPFFWMFVDNLVLNKEDLDVASRFLEMEPVTIPDVHGGSLQNAVRVWSNIPAIRSRHWALVSEEELSLLAQNKQSSKLAAKWPTKLVKNCFLPLREYFKYFSTELTSSLGGPSSGAPPPSGGSPAGSPTSTEEGTSESATPESGPGTSTEPSEGSAPGSPAGSPTSTEEGTSTEPSEGSAPGTSTEPSELEDKKYSIGLAIGTNSVGWAVITDEYKVPSKKFKVLGNTDRHSIKKNLIGALLFDSGETAEATRLKRTARRRYTRRKNRICYLQEIFSNEMAKVDDSFFHRLEESFLVEEDKKHERHPIFGNIVDEVAYHEKYPTIYHLRKKLVDSTDKADLRLIYLALAHMIKFRGHFLIEGDLNPDNSDVDKLFIQLVQTYNQLFEENPINASGVDAKAILSARLSKSRRLENLIAQLPGEKKNGLFGNLIALSLGLTPNFKSNFDLAEDAKLQLSKDTYDDDLDNLLAQIGDQYADLFLAAKNLSDAILLSDILRVNTEITKAPLSASMIKRYDEHHQDLTLLKALVRQQLPEKYKEIFFDQSKNGYAGYIDGGASQEEFYKFIKPILEKMDGTEELLVKLNREDLLRKQRTFDNGSIPHQIHLGELHAILRRQEDFYPFLKDNREKIEKILTFRIPYYVGPLARGNSRFAWMTRKSEETITPWNFEEVVDKGASAQSFIERMTNFDKNLPNEKVLPKHSLLYEYFTVYNELTKVKYVTEGMRKPAFLSGEQKKAIVDLLFKTNRKVTVKQLKEDYFKKIECFDSVEISGVEDRFNASLGTYHDLLKIIKDKDFLDNEENEDILEDIVLTLTLFEDREMIEERLKTYAHLFDDKVMKQLKRRRYTGWGRLSRKLINGIRDKQSGKTILDFLKSDGFANRNFMQLIHDDSLTFKEDIQKAQVSGQGDSLHEHIANLAGSPAIKKGILQTVKVVDELVKVMGRHKPENIVIEMARENQTTQKGQKNSRERMKRIEEGIKELGSQILKEHPVENTQLQNEKLYLYYLQNGRDMYVDQELDINRLSDYDVDAIVPQSFLKDDSIDNKVLTRSDKNRGKSDNVPSEEVVKKMKNYWRQLLNAKLITQRKFDNLTKAERGGLSELDKAGFIKRQLVETRQITKHVAQILDSRMNTKYDENDKLIREVKVITLKSKLVSDFRKDFQFYKVREINNYHHAHDAYLNAVVGTALIKKYPKLESEFVYGDYKVYDVRKMIAKSEQEIGKATAKYFFYSNIMNFFKTEITLANGEIRKRPLIETNGETGEIVWDKGRDFATVRKVLSMPQVNIVKKTEVQTGGFSKESILPKRNSDKLIARKKDWDPKKYGGFDSPTVAYSVLVVAKVEKGKSKKLKSVKELLGITIMERSSFEKNPIDFLEAKGYKEVKKDLIIKLPKYSLFELENGRKRMLASAGELQKGNELALPSKYVNFLYLASHYEKLKGSPEDNEQKQLFVEQHKHYLDEIIEQISEFSKRVILADANLDKVLSAYNKHRDKPIREQAENIIHLFTLTNLGAPAAFKYFDTTIDRKRYTSTKEVLDATLIHQSITGLYETRIDLSQLGGDSPKKKRKVGVDGSSGSETPGTSESATPESTGDSVAFEDVAVNFTLEEWALLDPSQKNLYRDVMRETFRNLASVGKQWEDQNIEDPFKIPRRNISHIPERLCESKEGGQGEESADYKDDDDKAPKKKRKVPKKKRKV

SEQ ID NO: 663 - protein, 2338 aa, Synthetic construct
MGTMPKKKRKVPKKKRKVYNHDQEFDPPKVYPPVPAEKRKPIRVLSLFDGIATGLLVLKDLGIQVDRYIASEVCEDSITVGMVRHQGKIMYVGDVRSVTQKHIQEWGPFDLVIGGSPCNDLSIVNPARKGLYEGTGRLFFEFYRLLHDARPKEGDDRPFFWLFENVVAMGVSDKRDISRFLESNPVMIDAKEVSAAHRARYFWGNLPGMNRPLASTVNDKLELQECLEHGRIAKFSKVRTITTRSNSIKQGKDQHFPVFMNEKEDILWCTEMERVFGFPVHYTDVSNMSRLARQRLLGRSWSVPVIRHLFAPLKEYFACVSSGNSNANSRGPSFSSGLVPLSLRGSHMAAIPALDPEAEPSMDVILVGSSELSSSVSPGTGRDLIAYEVKANQRNIEDICICCGSLQVHTQHPLFEGGICAPCKDKFLDALFLYDDDGYQSYCSICCSGETLLICGNPDCTRCYCFECVDSLVGPGTSGKVHAMSNWVCYLCLPSSRSGLLQRRRKWRSQLKAFYDRESENPLEMFETVPVWRRQPVRVLSLFEDIKKELTSLGFLESGSDPGQLKHVVDVTDTVRKDVEEWGPFDLVYGATPPLGHTCDRPPSWYLFQFHRLLQYARPKPGSPRPFFWMFVDNLVLNKEDLDVASRFLEMEPVTIPDVHGGSLQNAVRVWSNIPAIRSRHWALVSEEELSLLAQNKQSSKLAAKWPTKLVKNCFLPLREYFKYFSTELTSSLGGPSSGAPPPSGGSPAGSPTSTEEGTSESATPESGPGTSTEPSEGSAPGSPAGSPTSTEEGTSTEPSEGSAPGTSTEPSELEDKKYSIGLAIGTNSVGWAVITDEYKVPSKKFKVLGNTDRHSIKKNLIGALLFDSGETAEATRLKRTARRRYTRRKNRICYLQEIFSNEMAKVDDSFFHRLEESFLVEEDKKHERHPIFGNIVDEVAYHEKYPTIYHLRKKLVDSTDKADLRLIYLALAHMIKFRGHFLIEGDLNPDNSDVDKLFIQLVQTYNQLFEENPINASGVDAKAILSARLSKSRRLENLIAQLPGEKKNGLFGNLIALSLGLTPNFKSNFDLAEDAKLQLSKDTYDDDLDNLLAQIGDQYADLFLAAKNLSDAILLSDILRVNTEITKAPLSASMIKRYDEHHQDLTLLKALVRQQLPEKYKEIFFDQSKNGYAGYIDGGASQEEFYKFIKPILEKMDGTEELLVKLNREDLLRKQRTFDNGSIPHQIHLGELHAILRRQEDFYPFLKDNREKIEKILTFRIPYYVGPLARGNSRFAWMTRKSEETITPWNFEEVVDKGASAQSFIERMTNFDKNLPNEKVLPKHSLLYEYFTVYNELTKVKYVTEGMRKPAFLSGEQKKAIVDLLFKTNRKVTVKQLKEDYFKKIECFDSVEISGVEDRFNASLGTYHDLLKIIKDKDFLDNEENEDILEDIVLTLTLFEDREMIEERLKTYAHLFDDKVMKQLKRRRYTGWGRLSRKLINGIRDKQSGKTILDFLKSDGFANRNFMQLIHDDSLTFKEDIQKAQVSGQGDSLHEHIANLAGSPAIKKGILQTVKVVDELVKVMGRHKPENIVIEMARENQTTQKGQKNSRERMKRIEEGIKELGSQILKEHPVENTQLQNEKLYLYYLQNGRDMYVDQELDINRLSDYDVDAIVPQSFLKDDSIDNKVLTRSDKNRGKSDNVPSEEVVKKMKNYWRQLLNAKLITQRKFDNLTKAERGGLSELDKAGFIKRQLVETRQITKHVAQILDSRMNTKYDENDKLIREVKVITLKSKLVSDFRKDFQFYKVREINNYHHAHDAYLNAVVGTALIKKYPKLESEFVYGDYKVYDVRKMIAKSEQEIGKATAKYFFYSNIMNFFKTEITLANGEIRKRPLIETNGETGEIVWDKGRDFATVRKVLSMPQVNIVKKTEVQTGGFSKESILPKRNSDKLIARKKDWDPKKYGGFDSPTVAYSVLVVAKVEKGKSKKLKSVKELLGITIMERSSFEKNPIDFLEAKGYKEVKKDLIIKLPKYSLFELENGRKRMLASAGELQKGNELALPSKYVNFLYLASHYEKLKGSPEDNEQKQLFVEQHKHYLDEIIEQISEFSKRVILADANLDKVLSAYNKHRDKPIREQAENIIHLFTLTNLGAPAAFKYFDTTIDRKRYTSTKEVLDATLIHQSITGLYETRIDLSQLGGDSPKKKRKVGVDGSSGSETPGTSESATPESTGMNNSQGRVTFEDVTVNFTQGEWQRLNPEQRNLYRDVMLENYSNLVSVGQGETTKPDVILRLEQGKEPWLEEEEVLGSGRAEKNGDIGGQIWKPKDVKESLSADYKDDDDKAPKKKRKVPKKKRKV

SEQ ID NO: 664 - protein, 5 aa, Synthetic construct
GGGGS

SEQ ID NO: 665 - protein, 5 aa, Synthetic construct
EAAAK

SEQ ID NO: 666 - protein, 461 aa, Synthetic construct
MDSVAFEDVAVNFTLEEWALLDPSQKNLYRDVMRETFRNLASVGKQWEDQNIEDPFKIPRRNISHIPERLCESKEGGQGEETFSQIPDGILNKKTPGVKPCESSVCGEVGMGPSSLNRHIRDHTGREPNEYQEYGKKSYTRNQCGRALSYHRSFPVRERTHPGGKPYDCKECGETFISLVSIRRHMLTHRGGVPYKCKVCGKAFDYPSLFRIHERSHTGEKPYECKQCGKAFSCSSYIRIHERTHTGDKPYECKQCGKAFSCSKYIRIHERTHTGEKPYECKQCGKAFRCASSVRSHERTHTGEKLFECKECGKALTCLASVRRHMIKHTGNGPYKCKVCGKAFDFPSSFRIHERTHTGEKPYDCKQCGKAFSCSSSFRKHERIHTGEKPYKCTKCGKAFSRSSYFRIHERTHTGEKPYECKQCGKAFSRSTYFRVHEKIHTGEKPYENPNPNASVVPVLS

SEQ ID NO: 667 - DNA, 20 bp, Synthetic construct
  source 1..20: mol_type = other DNA
ggcggaagtgctgcctgata

SEQ ID NO: 668 - DNA, 20 bp, Synthetic construct
  source 1..20: mol_type = other DNA
gcaacaccgcctagaccgac

SEQ ID NO: 669 - DNA, 20 bp, Synthetic construct
  source 1..20: mol_type = other DNA
ggaggttcagaaagcctaag

SEQ ID NO: 670 - DNA, 20 bp, Synthetic construct
  source 1..20: mol_type = other DNA
gcagcactagagtcccctca

SEQ ID NO: 671 - DNA, 20 bp, Synthetic construct
  source 1..20: mol_type = other DNA
gaacaactcgtgactggggt

SEQ ID NO: 672 - DNA, 20 bp, Synthetic construct
  source 1..20: mol_type = other DNA
gggagaggaggacaagcgcc

SEQ ID NO: 673 - DNA, 20 bp, Synthetic construct
  source 1..20: mol_type = other DNA
ggacccaccgacaccacgcc

SEQ ID NO: 674 - DNA, 20 bp, Synthetic construct
  source 1..20: mol_type = other DNA
cgcgggaaaatgcaagacga

SEQ ID NO: 675 - protein, 439 aa, unidentified
  source 1..439: note = M.AluI
MSKANAKYSFVDLFAGIGGFHAALAATGGVCEYAVEIDREAAAVYERNWNKPALGDITDDANDEGVTLRGYDGPIDVLTGGFPCQPFSKSGAQHGMAETRGTLFWNIARIIEEREPTVLILENVRNLVGPRHRHEWLTIIETLRFFGYEVSGAPAIFSPHLLPAWMGGTPQVRERVFITATLVPERMRDERSTIRRATGRPLEGFPYWADSWTDFRELSRLVVIRGFQAPEREVVGDRKRYVARTDMPEGFVPASVTRPAIDETLPAWKQSHLRRNYDFFERHFAEVVAWAYRWGVYTDLFPASRRKLEWQAQDAPRLWDTVMHFRPSGIRAKRPTYLPALVAITQTSIVGPLERRLSPRETARLQGLPEWFDFGEQRAAATYKQMGNGVNVGVVRHILREHVRRDRALLKLTPAGQRIINAVLADEPDATVGALGAAE

SEQ ID NO: 676 - DNA, 18 bp, Synthetic construct
  source 1..18: mol_type = other DNA
gatggggctctggtggcg

SEQ ID NO: 677 - protein, 176 aa, Synthetic construct
SRPGERPFQCRICMRNFSRTDTLARHLRTHTGEKPFQCRICMRNFSRKTALNRHLKTHTGSQKPFQCRICMRNFSRNESLKVHLRTHTGEKPFQCRICMRNFSVKNTLTRHLKTHTGSQKPFQCRICMRNFSRREHLVRHLRTHTGEKPFQCRICMRNFSLTHNLRRHLKTHLRGS

SEQ ID NO: 678 - protein, 909 aa, Synthetic construct
MGTMYNHDQEFDPPKVYPPVPAEKRKPIRVLSLFDGIATGLLVLKDLGIQVDRYIASEVCEDSITVGMVRHQGKIMYVGDVRSVTQKHIQEWGPFDLVIGGSPCNDLSIVNPARKGLYEGTGRLFFEFYRLLHDARPKEGDDRPFFWLFENVVAMGVSDKRDISRFLESNPVMIDAKEVSAAHRARYFWGNLPGMNRPLASTVNDKLELQECLEHGRIAKFSKVRTITTRSNSIKQGKDQHFPVFMNEKEDILWCTEMERVFGFPVHYTDVSNMSRLARQRLLGRSWSVPVIRHLFAPLKEYFACVSSGNSNANSRGPSFSSGLVPLSLRGSHMGPMEIYKTVSAWKRQPVRVLSLFRNIDKVLKSLGFLESGSGSGGGTLKYVEDVTNVVRRDVEKWGPFDLVYGSTQPLGSSCDRCPGWYMFQFHRILQYALPRQESQRPFFWIFMDNLLLTEDDQETTTRFLQTEAVTLQDVRGRDYQNAMRVWSNIPGLKSKHAPLTPKEEEYLQAQVRSRSKLDAPKVDLLVKNCLLPLREYFKYFSQNSLPLGGPSSGAPPPSGGSPAGSPTSTEEGTSESATPESGPGTSTEPSEGSAPGSPAGSPTSTEEGTSTEPSEGSAPGTSTEPSEPKKKRKVSRPGERPFQCRICMRNFSRTDTLARHLRTHTGEKPFQCRICMRNFSRKTALNRHLKTHTGSQKPFQCRICMRNFSRNESLKVHLRTHTGEKPFQCRICMRNFSVKNTLTRHLKTHTGSQKPFQCRICMRNFSRREHLVRHLRTHTGEKPFQCRICMRNFSLTHNLRRHLKTHLRGSPKKKRKVSGSETPGTSESATPESTGRTLVTFKDVFVDFTREEWKLLDTAQQIVYRNVMLENYKNLVSLGYQLTKPDVILRLEKGEEPSADYKDDDDKA

SEQ ID NO: 679 - protein, 923 aa, Synthetic construct
MGTMPKKKRKVPKKKRKVYNHDQEFDPPKVYPPVPAEKRKPIRVLSLFDGIATGLLVLKDLGIQVDRYIASEVCEDSITVGMVRHQGKIMYVGDVRSVTQKHIQEWGPFDLVIGGSPCNDLSIVNPARKGLYEGTGRLFFEFYRLLHDARPKEGDDRPFFWLFENVVAMGVSDKRDISRFLESNPVMIDAKEVSAAHRARYFWGNLPGMNRPLASTVNDKLELQECLEHGRIAKFSKVRTITTRSNSIKQGKDQHFPVFMNEKEDILWCTEMERVFGFPVHYTDVSNMSRLARQRLLGRSWSVPVIRHLFAPLKEYFACVSSGNSNANSRGPSFSSGLVPLSLRGSHMGPMEIYKTVSAWKRQPVRVLSLFRNIDKVLKSLGFLESGSGSGGGTLKYVEDVTNVVRRDVEKWGPFDLVYGSTQPLGSSCDRCPGWYMFQFHRILQYALPRQESQRPFFWIFMDNLLLTEDDQETTTRFLQTEAVTLQDVRGRDYQNAMRVWSNIPGLKSKHAPLTPKEEEYLQAQVRSRSKLDAPKVDLLVKNCLLPLREYFKYFSQNSLPLGGPSSGAPPPSGGSPAGSPTSTEEGTSESATPESGPGTSTEPSEGSAPGSPAGSPTSTEEGTSTEPSEGSAPGTSTEPSESRPGERPFQCRICMRNFSRTDTLARHLRTHTGEKPFQCRICMRNFSRKTALNRHLKTHTGSQKPFQCRICMRNFSRNESLKVHLRTHTGEKPFQCRICMRNFSVKNTLTRHLKTHTGSQKPFQCRICMRNFSRREHLVRHLRTHTGEKPFQCRICMRNFSLTHNLRRHLKTHLRGSSGSETPGTSESATPESTGRTLVTFKDVFVDFTREEWKLLDTAQQIVYRNVMLENYKNLVSLGYQLTKPDVILRLEKGEEPSADYKDDDDKAPKKKRKVPKKKRKV

SEQ ID NO: 680 - protein, 179 aa, Synthetic construct
SRPGERPFQCRICMRNFSDPSVLKRHLRTHTGEKPFQCRICMRNFSRTEHLARHLKTHTGGGGSQKPFQCRICMRNFSQSPHLKRHLRTHTGEKPFQCRICMRNFSDQTTLRRHLKTHTGSQKPFQCRICMRNFSKHSNLTRHTRTHTGEKPFQCRICMRNFSQMETLKRHLRTHLRGS

SEQ ID NO: 681 - protein, 912 aa, Synthetic construct
MGTMYNHDQEFDPPKVYPPVPAEKRKPIRVLSLFDGIATGLLVLKDLGIQVDRYIASEVCEDSITVGMVRHQGKIMYVGDVRSVTQKHIQEWGPFDLVIGGSPCNDLSIVNPARKGLYEGTGRLFFEFYRLLHDARPKEGDDRPFFWLFENVVAMGVSDKRDISRFLESNPVMIDAKEVSAAHRARYFWGNLPGMNRPLASTVNDKLELQECLEHGRIAKFSKVRTITTRSNSIKQGKDQHFPVFMNEKEDILWCTEMERVFGFPVHYTDVSNMSRLARQRLLGRSWSVPVIRHLFAPLKEYFACVSSGNSNANSRGPSFSSGLVPLSLRGSHMGPMEIYKTVSAWKRQPVRVLSLFRNIDKVLKSLGFLESGSGSGGGTLKYVEDVTNVVRRDVEKWGPFDLVYGSTQPLGSSCDRCPGWYMFQFHRILQYALPRQESQRPFFWIFMDNLLLTEDDQETTTRFLQTEAVTLQDVRGRDYQNAMRVWSNIPGLKSKHAPLTPKEEEYLQAQVRSRSKLDAPKVDLLVKNCLLPLREYFKYFSQNSLPLGGPSSGAPPPSGGSPAGSPTSTEEGTSESATPESGPGTSTEPSEGSAPGSPAGSPTSTEEGTSTEPSEGSAPGTSTEPSEPKKKRKVSRPGERPFQCRICMRNFSDPSVLKRHLRTHTGEKPFQCRICMRNFSRTEHLARHLKTHTGGGGSQKPFQCRICMRNFSQSPHLKRHLRTHTGEKPFQCRICMRNFSDQTTLRRHLKTHTGSQKPFQCRICMRNFSKHSNLTRHTRTHTGEKPFQCRICMRNFSQMETLKRHLRTHLRGSPKKKRKVSGSETPGTSESATPESTGRTLVTFKDVFVDFTREEWKLLDTAQQIVYRNVMLENYKNLVSLGYQLTKPDVILRLEKGEEPSADYKDDDDKA

SEQ ID NO: 682 - protein, 926 aa, Synthetic construct
MGTMPKKKRKVPKKKRKVYNHDQEFDPPKVYPPVPAEKRKPIRVLSLFDGIATGLLVLKDLGIQVDRYIASEVCEDSITVGMVRHQGKIMYVGDVRSVTQKHIQEWGPFDLVIGGSPCNDLSIVNPARKGLYEGTGRLFFEFYRLLHDARPKEGDDRPFFWLFENVVAMGVSDKRDISRFLESNPVMIDAKEVSAAHRARYFWGNLPGMNRPLASTVNDKLELQECLEHGRIAKFSKVRTITTRSNSIKQGKDQHFPVFMNEKEDILWCTEMERVFGFPVHYTDVSNMSRLARQRLLGRSWSVPVIRHLFAPLKEYFACVSSGNSNANSRGPSFSSGLVPLSLRGSHMGPMEIYKTVSAWKRQPVRVLSLFRNIDKVLKSLGFLESGSGSGGGTLKYVEDVTNVVRRDVEKWGPFDLVYGSTQPLGSSCDRCPGWYMFQFHRILQYALPRQESQRPFFWIFMDNLLLTEDDQETTTRFLQTEAVTLQDVRGRDYQNAMRVWSNIPGLKSKHAPLTPKEEEYLQAQVRSRSKLDAPKVDLLVKNCLLPLREYFKYFSQNSLPLGGPSSGAPPPSGGSPAGSPTSTEEGTSESATPESGPGTSTEPSEGSAPGSPAGSPTSTEEGTSTEPSEGSAPGTSTEPSESRPGERPFQCRICMRNFSDPSVLKRHLRTHTGEKPFQCRICMRNFSRTEHLARHLKTHTGGGGSQKPFQCRICMRNFSQSPHLKRHLRTHTGEKPFQCRICMRNFSDQTTLRRHLKTHTGSQKPFQCRICMRNFSKHSNLTRHTRTHTGEKPFQCRICMRNFSQMETLKRHLRTHLRGSSGSETPGTSESATPESTGRTLVTFKDVFVDFTREEWKLLDTAQQIVYRNVMLENYKNLVSLGYQLTKPDVILRLEKGEEPSADYKDDDDKAPKKKRKVPKKKRKV

SEQ ID NO: 683 - DNA, 18 bp, Synthetic construct
  source 1..18: mol_type = other DNA
ggtggggaggactgtgca

SEQ ID NO: 684 - protein, 176 aa, Synthetic construct
SRPGERPFQCRICMRNFSQSTTLKRHLRTHTGEKPFQCRICMRNFSGAHGLAGHLKTHTGSQKPFQCRICMRNFSDQTNLRRHLRTHTGEKPFQCRICMRNFSRQDNLQRHLKTHTGSQKPFQCRICMRNFSKGDHLRRHTRTHTGEKPFQCRICMRNFSEAHHLSRHLRTHLRGS

SEQ ID NO: 685 - protein, 909 aa, Synthetic construct
MGTMYNHDQEFDPPKVYPPVPAEKRKPIRVLSLFDGIATGLLVLKDLGIQVDRYIASEVCEDSITVGMVRHQGKIMYVGDVRSVTQKHIQEWGPFDLVIGGSPCNDLSIVNPARKGLYEGTGRLFFEFYRLLHDARPKEGDDRPFFWLFENVVAMGVSDKRDISRFLESNPVMIDAKEVSAAHRARYFWGNLPGMNRPLASTVNDKLELQECLEHGRIAKFSKVRTITTRSNSIKQGKDQHFPVFMNEKEDILWCTEMERVFGFPVHYTDVSNMSRLARQRLLGRSWSVPVIRHLFAPLKEYFACVSSGNSNANSRGPSFSSGLVPLSLRGSHMGPMEIYKTVSAWKRQPVRVLSLFRNIDKVLKSLGFLESGSGSGGGTLKYVEDVTNVVRRDVEKWGPFDLVYGSTQPLGSSCDRCPGWYMFQFHRILQYALPRQESQRPFFWIFMDNLLLTEDDQETTTRFLQTEAVTLQDVRGRDYQNAMRVWSNIPGLKSKHAPLTPKEEEYLQAQVRSRSKLDAPKVDLLVKNCLLPLREYFKYFSQNSLPLGGPSSGAPPPSGGSPAGSPTSTEEGTSESATPESGPGTSTEPSEGSAPGSPAGSPTSTEEGTSTEPSEGSAPGTSTEPSEPKKKRKVSRPGERPFQCRICMRNFSQSTTLKRHLRTHTGEKPFQCRICMRNFSGAHGLAGHLKTHTGSQKPFQCRICMRNFSDQTNLRRHLRTHTGEKPFQCRICMRNFSRQDNLQRHLKTHTGSQKPFQCRICMRNFSKGDHLRRHTRTHTGEKPFQCRICMRNFSEAHHLSRHLRTHLRGSPKKKRKVSGSETPGTSESATPESTGRTLVTFKDVFVDFTREEWKLLDTAQQIVYRNVMLENYKNLVSLGYQLTKPDVILRLEKGEEPSADYKDDDDKA

SEQ ID NO: 686 - protein, 923 aa, Synthetic construct
MGTMPKKKRKVPKKKRKVYNHDQEFDPPKVYPPVPAEKRKPIRVLSLFDGIATGLLVLKDLGIQVDRYIASEVCEDSITVGMVRHQGKIMYVGDVRSVTQKHIQEWGPFDLVIGGSPCNDLSIVNPARKGLYEGTGRLFFEFYRLLHDARPKEGDDRPFFWLFENVVAMGVSDKRDISRFLESNPVMIDAKEVSAAHRARYFWGNLPGMNRPLASTVNDKLELQECLEHGRIAKFSKVRTITTRSNSIKQGKDQHFPVFMNEKEDILWCTEMERVFGFPVHYTDVSNMSRLARQRLLGRSWSVPVIRHLFAPLKEYFACVSSGNSNANSRGPSFSSGLVPLSLRGSHMGPMEIYKTVSAWKRQPVRVLSLFRNIDKVLKSLGFLESGSGSGGGTLKYVEDVTNVVRRDVEKWGPFDLVYGSTQPLGSSCDRCPGWYMFQFHRILQYALPRQESQRPFFWIFMDNLLLTEDDQETTTRFLQTEAVTLQDVRGRDYQNAMRVWSNIPGLKSKHAPLTPKEEEYLQAQVRSRSKLDAPKVDLLVKNCLLPLREYFKYFSQNSLPLGGPSSGAPPPSGGSPAGSPTSTEEGTSESATPESGPGTSTEPSEGSAPGSPAGSPTSTEEGTSTEPSEGSAPGTSTEPSESRPGERPFQCRICMRNFSQSTTLKRHLRTHTGEKPFQCRICMRNFSGAHGLAGHLKTHTGSQKPFQCRICMRNFSDQTNLRRHLRTHTGEKPFQCRICMRNFSRQDNLQRHLKTHTGSQKPFQCRICMRNFSKGDHLRRHTRTHTGEKPFQCRICMRNFSEAHHLSRHLRTHLRGSSGSETPGTSESATPESTGRTLVTFKDVFVDFTREEWKLLDTAQQIVYRNVMLENYKNLVSLGYQLTKPDVILRLEKGEEPSADYKDDDDKAPKKKRKVPKKKRKV

SEQ ID NO: 687 - DNA, 19 bp, Synthetic construct
  source 1..19: mol_type = other DNA
gcaggaggacgaggacggc

SEQ ID NO: 688 - protein, 179 aa, Synthetic construct
SRPGERPFQCRICMRNFSTPSKLDRHTRTHTGEKPFQCRICMRNFSLAENLRRHLRTHTGSQKPFQCRICMRNFSRQDNLGRHLRTHTGEKPFQCRICMRNFSDGGNLGRHLKTHTGGGGSQKPFQCRICMRNFSQSPHLKRHLRTHTGEKPFQCRICMRNFSQSTSLQRHLKTHLRGS

SEQ ID NO: 689 - protein, 912 aa, Synthetic construct
MGTMYNHDQEFDPPKVYPPVPAEKRKPIRVLSLFDGIATGLLVLKDLGIQVDRYIASEVCEDSITVGMVRHQGKIMYVGDVRSVTQKHIQEWGPFDLVIGGSPCNDLSIVNPARKGLYEGTGRLFFEFYRLLHDARPKEGDDRPFFWLFENVVAMGVSDKRDISRFLESNPVMIDAKEVSAAHRARYFWGNLPGMNRPLASTVNDKLELQECLEHGRIAKFSKVRTITTRSNSIKQGKDQHFPVFMNEKEDILWCTEMERVFGFPVHYTDVSNMSRLARQRLLGRSWSVPVIRHLFAPLKEYFACVSSGNSNANSRGPSFSSGLVPLSLRGSHMGPMEIYKTVSAWKRQPVRVLSLFRNIDKVLKSLGFLESGSGSGGGTLKYVEDVTNVVRRDVEKWGPFDLVYGSTQPLGSSCDRCPGWYMFQFHRILQYALPRQESQRPFFWIFMDNLLLTEDDQETTTRFLQTEAVTLQDVRGRDYQNAMRVWSNIPGLKSKHAPLTPKEEEYLQAQVRSRSKLDAPKVDLLVKNCLLPLREYFKYFSQNSLPLGGPSSGAPPPSGGSPAGSPTSTEEGTSESATPESGPGTSTEPSEGSAPGSPAGSPTSTEEGTSTEPSEGSAPGTSTEPSEPKKKRKVSRPGERPFQCRICMRNFSTPSKLDRHTRTHTGEKPFQCRICMRNFSLAENLRRHLRTHTGSQKPFQCRICMRNFSRQDNLGRHLRTHTGEKPFQCRICMRNFSDGGNLGRHLKTHTGGGGSQKPFQCRICMRNFSQSPHLKRHLRTHTGEKPFQCRICMRNFSQSTSLQRHLKTHLRGSPKKKRKVSGSETPGTSESATPESTGRTLVTFKDVFVDFTREEWKLLDTAQQIVYRNVMLENYKNLVSLGYQLTKPDVILRLEKGEEPSADYKDDDDKA

SEQ ID NO: 690 - protein, 926 aa, Synthetic construct
MGTMPKKKRKVPKKKRKVYNHDQEFDPPKVYPPVPAEKRKPIRVLSLFDGIATGLLVLKDLGIQVDRYIASEVCEDSITVGMVRHQGKIMYVGDVRSVTQKHIQEWGPFDLVIGGSPCNDLSIVNPARKGLYEGTGRLFFEFYRLLHDARPKEGDDRPFFWLFENVVAMGVSDKRDISRFLESNPVMIDAKEVSAAHRARYFWGNLPGMNRPLASTVNDKLELQECLEHGRIAKFSKVRTITTRSNSIKQGKDQHFPVFMNEKEDILWCTEMERVFGFPVHYTDVSNMSRLARQRLLGRSWSVPVIRHLFAPLKEYFACVSSGNSNANSRGPSFSSGLVPLSLRGSHMGPMEIYKTVSAWKRQPVRVLSLFRNIDKVLKSLGFLESGSGSGGGTLKYVEDVTNVVRRDVEKWGPFDLVYGSTQPLGSSCDRCPGWYMFQFHRILQYALPRQESQRPFFWIFMDNLLLTEDDQETTTRFLQTEAVTLQDVRGRDYQNAMRVWSNIPGLKSKHAPLTPKEEEYLQAQVRSRSKLDAPKVDLLVKNCLLPLREYFKYFSQNSLPLGGPSSGAPPPSGGSPAGSPTSTEEGTSESATPESGPGTSTEPSEGSAPGSPAGSPTSTEEGTSTEPSEGSAPGTSTEPSESRPGERPFQCRICMRNFSTPSKLDRHTRTHTGEKPFQCRICMRNFSLAENLRRHLRTHTGSQKPFQCRICMRNFSRQDNLGRHLRTHTGEKPFQCRICMRNFSDGGNLGRHLKTHTGGGGSQKPFQCRICMRNFSQSPHLKRHLRTHTGEKPFQCRICMRNFSQSTSLQRHLKTHLRGSSGSETPGTSESATPESTGRTLVTFKDVFVDFTREEWKLLDTAQQIVYRNVMLENYKNLVSLGYQLTKPDVILRLEKGEEPSADYKDDDDKAPKKKRKVPKKKRKV

SEQ ID NO: 691 - DNA, 19 bp, Synthetic construct
  source 1..19: mol_type = other DNA
gcaggaggacgaggacggc

SEQ ID NO: 692 - protein, 179 aa, Synthetic construct
SRPGERPFQCRICMRNFSERAKLIRHLRTHTGEKPFQCRICMRNFSDPSNLRRHLKTHTGSQKPFQCRICMRNFSRQDNLGRHLRTHTGEKPFQCRICMRNFSDQGNLGRHLKTHTGGGGSQKPFQCRICMRNFSQSAHLKRHLRTHTGEKPFQCRICMRNFSQDVSLVRHLKTHLRGS

SEQ ID NO: 693 - protein, 912 aa, Synthetic construct
MGTMYNHDQEFDPPKVYPPVPAEKRKPIRVLSLFDGIATGLLVLKDLGIQVDRYIASEVCEDSITVGMVRHQGKIMYVGDVRSVTQKHIQEWGPFDLVIGGSPCNDLSIVNPARKGLYEGTGRLFFEFYRLLHDARPKEGDDRPFFWLFENVVAMGVSDKRDISRFLESNPVMIDAKEVSAAHRARYFWGNLPGMNRPLASTVNDKLELQECLEHGRIAKFSKVRTITTRSNSIKQGKDQHFPVFMNEKEDILWCTEMERVFGFPVHYTDVSNMSRLARQRLLGRSWSVPVIRHLFAPLKEYFACVSSGNSNANSRGPSFSSGLVPLSLRGSHMGPMEIYKTVSAWKRQPVRVLSLFRNIDKVLKSLGFLESGSGSGGGTLKYVEDVTNVVRRDVEKWGPFDLVYGSTQPLGSSCDRCPGWYMFQFHRILQYALPRQESQRPFFWIFMDNLLLTEDDQETTTRFLQTEAVTLQDVRGRDYQNAMRVWSNIPGLKSKHAPLTPKEEEYLQAQVRSRSKLDAPKVDLLVKNCLLPLREYFKYFSQNSLPLGGPSSGAPPPSGGSPAGSPTSTEEGTSESATPESGPGTSTEPSEGSAPGSPAGSPTSTEEGTSTEPSEGSAPGTSTEPSEPKKKRKVSRPGERPFQCRICMRNFSERAKLIRHLRTHTGEKPFQCRICMRNFSDPSNLRRHLKTHTGSQKPFQCRICMRNFSRQDNLGRHLRTHTGEKPFQCRICMRNFSDQGNLGRHLKTHTGGGGSQKPFQCRICMRNFSQSAHLKRHLRTHTGEKPFQCRICMRNFSQDVSLVRHLKTHLRGSPKKKRKVSGSETPGTSESATPESTGRTLVTFKDVFVDFTREEWKLLDTAQQIVYRNVMLENYKNLVSLGYQLTKPDVILRLEKGEEPSADYKDDDDKA

SEQ ID NO: 694 - protein, 926 aa, Synthetic construct
MGTMPKKKRKVPKKKRKVYNHDQEFDPPKVYPPVPAEKRKPIRVLSLFDGIATGLLVLKDLGIQVDRYIASEVCEDSITVGMVRHQGKIMYVGDVRSVTQKHIQEWGPFDLVIGGSPCNDLSIVNPARKGLYEGTGRLFFEFYRLLHDARPKEGDDRPFFWLFENVVAMGVSDKRDISRFLESNPVMIDAKEVSAAHRARYFWGNLPGMNRPLASTVNDKLELQECLEHGRIAKFSKVRTITTRSNSIKQGKDQHFPVFMNEKEDILWCTEMERVFGFPVHYTDVSNMSRLARQRLLGRSWSVPVIRHLFAPLKEYFACVSSGNSNANSRGPSFSSGLVPLSLRGSHMGPMEIYKTVSAWKRQPVRVLSLFRNIDKVLKSLGFLESGSGSGGGTLKYVEDVTNVVRRDVEKWGPFDLVYGSTQPLGSSCDRCPGWYMFQFHRILQYALPRQESQRPFFWIFMDNLLLTEDDQETTTRFLQTEAVTLQDVRGRDYQNAMRVWSNIPGLKSKHAPLTPKEEEYLQAQVRSRSKLDAPKVDLLVKNCLLPLREYFKYFSQNSLPLGGPSSGAPPPSGGSPAGSPTSTEEGTSESATPESGPGTSTEPSEGSAPGSPAGSPTSTEEGTSTEPSEGSAPGTSTEPSESRPGERPFQCRICMRNFSERAKLIRHLRTHTGEKPFQCRICMRNFSDPSNLRRHLKTHTGSQKPFQCRICMRNFSRQDNLGRHLRTHTGEKPFQCRICMRNFSDQGNLGRHLKTHTGGGGSQKPFQCRICMRNFSQSAHLKRHLRTHTGEKPFQCRICMRNFSQDVSLVRHLKTHLRGSSGSETPGTSESATPESTGRTLVTFKDVFVDFTREEWKLLDTAQQIVYRNVMLENYKNLVSLGYQLTKPDVILRLEKGEEPSADYKDDDDKAPKKKRKVPKKKRKV

SEQ ID NO: 695-699 - skipped (5 entries)

SEQ ID NO: 700 - DNA, 18 bp, Synthetic construct
  source 1..18: mol_type = other DNA
ccggcagaacttggagtc

SEQ ID NO: 701 - DNA, 18 bp, Synthetic construct
  source 1..18: mol_type = other DNA
ggtggggaggactgtgca

SEQ ID NO: 702 - DNA, 18 bp, Synthetic construct
  source 1..18: mol_type = other DNA
ggtggggaggactgtgca

SEQ ID NO: 703 - DNA, 18 bp, Synthetic construct
  source 1..18: mol_type = other DNA
gatggggctctggtggcg

SEQ ID NO: 704 - DNA, 18 bp, Synthetic construct
  source 1..18: mol_type = other DNA
gatggggctctggtggcg

SEQ ID NO: 705 - DNA, 18 bp, Synthetic construct
  source 1..18: mol_type = other DNA
gatggggctctggtggcg

SEQ ID NO: 706 - DNA, 18 bp, Synthetic construct
  source 1..18: mol_type = other DNA
gcaggaggatgaaaaggg

SEQ ID NO: 707 - DNA, 18 bp, Synthetic construct
  source 1..18: mol_type = other DNA
ggagccgctgctgcaacg

SEQ ID NO: 708 - DNA, 18 bp, Synthetic construct
  source 1..18: mol_type = other DNA
gactgtgcaggagctgaa

SEQ ID NO: 709 - DNA, 18 bp, Synthetic construct
  source 1..18: mol_type = other DNA
ggggaggactgtgcagga

SEQ ID NO: 710 - DNA, 18 bp, Synthetic construct
  source 1..18: mol_type = other DNA
ggtggggaggactgtgca

SEQ ID NO: 711 - DNA, 18 bp, Synthetic construct
  source 1..18: mol_type = other DNA
ggtggggaggactgtgca

SEQ ID NO: 712 - DNA, 18 bp, Synthetic construct
  source 1..18: mol_type = other DNA
tgcggtggggaggactgt

SEQ ID NO: 713 - DNA, 18 bp, Synthetic construct
  source 1..18: mol_type = other DNA
gtggaaggtggctgtggt

SEQ ID NO: 714 - DNA, 18 bp, Synthetic construct
  source 1..18: mol_type = other DNA
gcggtggaaggtggctgt

SEQ ID NO: 715 - DNA, 18 bp, Synthetic construct
  source 1..18: mol_type = other DNA
gcggtggaaggtggctgt

SEQ ID NO: 716 - DNA, 18 bp, Synthetic construct
  source 1..18: mol_type = other DNA
gcggcgggggaggacggg

SEQ ID NO: 717 - DNA, 18 bp, Synthetic construct
  source 1..18: mol_type = other DNA
gcggcgggggaggacggg

SEQ ID NO: 718 - DNA, 18 bp, Synthetic construct
  source 1..18: mol_type = other DNA
tagggatgggaggccggg

SEQ ID NO: 719 - DNA, 18 bp, Synthetic construct
  source 1..18: mol_type = other DNA
ggcgccgccggcgtggac

SEQ ID NO: 720 - DNA, 18 bp, Synthetic construct
  source 1..18: mol_type = other DNA
ggcgccgccggcgtggac

SEQ ID NO: 721 - DNA, 18 bp, Synthetic construct
  source 1..18: mol_type = other DNA
gtcgttgcagcagcggct

SEQ ID NO: 722 - DNA, 18 bp, Synthetic construct
  source 1..18: mol_type = other DNA
gatggggctctggtggcg

SEQ ID NO: 723 - DNA, 18 bp, Synthetic construct
  source 1..18: mol_type = other DNA
tcggtgggcagcgaggag

SEQ ID NO: 724 - DNA, 18 bp, Synthetic construct
  source 1..18: mol_type = other DNA
ggggaggactgtgcagga

SEQ ID NO: 725 - DNA, 18 bp, Synthetic construct
  source 1..18: mol_type = other DNA
ggggaggactgtgcagga

SEQ ID NO: 726 - DNA, 18 bp, Synthetic construct
  source 1..18: mol_type = other DNA
gcggcgggggaggacggg

SEQ ID NO: 727 - DNA, 19 bp, Synthetic construct
  source 1..19: mol_type = other DNA
gaggagtgagccaggcagt

SEQ ID NO: 728 - DNA, 19 bp, Synthetic construct
  source 1..19: mol_type = other DNA
ggtgtgggtgcttgacgcc

SEQ ID NO: 729 - DNA, 19 bp, Synthetic construct
  source 1..19: mol_type = other DNA
tctgagcctggaggagtga

SEQ ID NO: 730 - DNA, 19 bp, Synthetic construct
  source 1..19: mol_type = other DNA
gaggagtgagccaggcagt

SEQ ID NO: 731 - DNA, 19 bp, Synthetic construct
  source 1..19: mol_type = other DNA
gagggccaggggagaggtt

SEQ ID NO: 732 - DNA, 19 bp, Synthetic construct
  source 1..19: mol_type = other DNA
gcaggaggacgaggacggc

SEQ ID NO: 733 - DNA, 19 bp, Synthetic construct
  source 1..19: mol_type = other DNA
gcaggaggacgaggacggc

SEQ ID NO: 734 - DNA, 19 bp, Synthetic construct
  source 1..19: mol_type = other DNA
gcaggaggacgaggacggc

SEQ ID NO: 735 - DNA, 19 bp, Synthetic construct
  source 1..19: mol_type = other DNA
tggggaggactgtgcagga

SEQ ID NO: 736 - DNA, 19 bp, Synthetic construct
  source 1..19: mol_type = other DNA
gttgcaggcgggcgccgcc

SEQ ID NO: 737 - DNA, 19 bp, Synthetic construct
  source 1..19: mol_type = other DNA
gttgcaggcgggcgccgcc

SEQ ID NO: 738 - DNA, 19 bp, Synthetic construct
  source 1..19: mol_type = other DNA
gctgtttggggagggcgag

SEQ ID NO: 739 - DNA, 19 bp, Synthetic construct
  source 1..19: mol_type = other DNA
gctgtttggggagggcgag

SEQ ID NO: 740 - DNA, 19 bp, Synthetic construct
  source 1..19: mol_type = other DNA
gcagaggccggagggggtc

SEQ ID NO: 741 - DNA, 19 bp, Synthetic construct
  source 1..19: mol_type = other DNA
tggggagggcgaggccgaa

SEQ ID NO: 742 - DNA, 19 bp, Synthetic construct
  source 1..19: mol_type = other DNA
gcgggtgtagggatgggag

SEQ ID NO: 743 - DNA, 19 bp, Synthetic construct
  source 1..19: mol_type = other DNA
gcgggtgtagggatgggag

SEQ ID NO: 744 - DNA, 19 bp, Synthetic construct
  source 1..19: mol_type = other DNA
ggagctgggagccgctgct

SEQ ID NO: 745 - DNA, 19 bp, Synthetic construct
  source 1..19: mol_type = other DNA
gcaaggcggcgggggagga

SEQ ID NO: 746 - DNA, 20 bp, Synthetic construct
  source 1..20: mol_type = other DNA
gctgtttggggagggcgagg

SEQ ID NO: 747 - DNA, 20 bp, Synthetic construct
  source 1..20: mol_type = other DNA
gctgtttggggagggcgagg

SEQ ID NO: 748 - protein, 7 aa, Synthetic construct
DHSSLKR

SEQ ID NO: 749 - protein, 7 aa, Synthetic construct
QSPHLQR

SEQ ID NO: 750 - protein, 7 aa, Synthetic construct
YKHVLVN

SEQ ID NO: 751 - protein, 7 aa, Synthetic construct
QMSNLDR

SEQ ID NO: 752 - protein, 7 aa, Synthetic construct
QAETLKR

SEQ ID NO: 753 - protein, 7 aa, Synthetic construct
RNYDLGI

SEQ ID NO: 754 - protein, 7 aa, Synthetic construct
QSTTLKR

SEQ ID NO: 755 - protein, 7 aa, Synthetic construct
QAHGLTA

SEQ ID NO: 756 - protein, 7 aa, Synthetic construct
DAANLRR

SEQ ID NO: 757 - protein, 7 aa, Synthetic construct
RRDNLLR

SEQ ID NO: 758 - protein, 7 aa, Synthetic construct
RNTHLAR

SEQ ID NO: 759 - protein, 7 aa, Synthetic construct
EAHHLSR

SEQ ID NO: 760 - protein, 7 aa, Synthetic construct
QSTTLKR

SEQ ID NO: 761 - protein, 7 aa, Synthetic construct
GAHGLAG

SEQ ID NO: 762 - protein, 7 aa, Synthetic construct
DQTNLRR

SEQ ID NO: 763 - protein, 7 aa, Synthetic construct
RQDNLQR

SEQ ID NO: 764 - protein, 7 aa, Synthetic construct
KGDHLRR

SEQ ID NO: 765 - protein, 7 aa, Synthetic construct
EAHHLSR

SEQ ID NO: 766 - protein, 7 aa, Synthetic construct
RTDTLAR

SEQ ID NO: 767 - protein, 7 aa, Synthetic construct
RKTALNR

SEQ ID NO: 768 - protein, 7 aa, Synthetic construct
RNESLKV

SEQ ID NO: 769 - protein, 7 aa, Synthetic construct
VKNTLTR

SEQ ID NO: 770 - protein, 7 aa, Synthetic construct
RREHLVR

SEQ ID NO: 771 - protein, 7 aa, Synthetic construct
ISHNLAR

SEQ ID NO: 772 - protein, 7 aa, Synthetic construct
RRLTLDR

SEQ ID NO: 773 - protein, 7 aa, Synthetic construct
RRDLLHN

SEQ ID NO: 774 - protein, 7 aa, Synthetic construct
RNESLKV

SEQ ID NO: 775 - protein, 7 aa, Synthetic construct
VGASLKR

SEQ ID NO: 776 - protein, 7 aa, Synthetic construct
RREHLVR

SEQ ID NO: 777 - protein, 7 aa, Synthetic construct
LEHNLGR

SEQ ID NO: 778 - protein, 7 aa, Synthetic construct
RNHTLQR

SEQ ID NO: 779 - protein, 7 aa, Synthetic construct
RREVLEN

SEQ ID NO: 780 - protein, 7 aa, Synthetic construct
RHESLIV

SEQ ID NO: 781 - protein, 7 aa, Synthetic construct
VGASLKR

SEQ ID NO: 782 - protein, 7 aa, Synthetic construct
KKDHLHR

SEQ ID NO: 783 - protein, 7 aa, Synthetic construct
LMHNLTR

SEQ ID NO: 784 - protein, 7 aa, Synthetic construct
KRERLER

SEQ ID NO: 785 - protein, 7 aa, Synthetic construct
QKGNLVV

SEQ ID NO: 786 - protein, 7 aa, Synthetic construct
QKTHLAV

SEQ ID NO: 787 - protein, 7 aa, Synthetic construct
QGGHLKR

SEQ ID NO: 788 - protein, 7 aa, Synthetic construct
QRPHLTN

SEQ ID NO: 789 - protein, 7 aa, Synthetic construct
QAATLQR

SEQ ID NO: 790 - protein, 7 aa, Synthetic construct
RSQTLAQ

SEQ ID NO: 791 - protein, 7 aa, Synthetic construct
QSTTLKR

SEQ ID NO: 792 - protein, 7 aa, Synthetic construct
LRDSLKR

SEQ ID NO: 793 - protein, 7 aa, Synthetic construct
LGHTLNR

SEQ ID NO: 794 - protein, 7 aa, Synthetic construct
DPSVLTR

SEQ ID NO: 795 - protein, 7 aa, Synthetic construct
QNSHLRR

SEQ ID NO: 796 - protein, 7 aa, Synthetic construct
QRGNLAR

SEQ ID NO: 797 - protein, 7 aa, Synthetic construct
VSNTLTR

SEQ ID NO: 798 - protein, 7 aa, Synthetic construct
QRPHLTN

SEQ ID NO: 799 - protein, 7 aa, Synthetic construct
QAATLQR

SEQ ID NO: 800 - protein, 7 aa, Synthetic construct
RRQHLEL

SEQ ID NO: 801 - protein, 7 aa, Synthetic construct
DRGNLTR

SEQ ID NO: 802 - protein, 7 aa, Synthetic construct
QSAHLKR

SEQ ID NO: 803 - protein, 7 aa, Synthetic construct
QDVSLVR

SEQ ID NO: 804 - protein, 7 aa, Synthetic construct
RKQHLQL

SEQ ID NO: 805 - protein, 7 aa, Synthetic construct
DRGNLTR

SEQ ID NO: 806 - protein, 7 aa, Synthetic construct
RDDNLQR

SEQ ID NO: 807 - protein, 7 aa, Synthetic construct
RMEHLPR

SEQ ID NO: 808 - protein, 7 aa, Synthetic construct
QSTTLKR

SEQ ID NO: 809 - protein, 7 aa, Synthetic construct
QPHGLGA

SEQ ID NO: 810 - protein, 7 aa, Synthetic construct
LVENLRR

SEQ ID NO: 811 - protein, 7 aa, Synthetic construct
RVENLHR

SEQ ID NO: 812 - protein, 7 aa, Synthetic construct
RREHLVR

SEQ ID NO: 813 - protein, 7 aa, Synthetic construct
LSQGLAR

SEQ ID NO: 814 - protein, 7 aa, Synthetic construct
QSTTLKR

SEQ ID NO: 815 - protein, 7 aa, Synthetic construct
QAHGLTA

SEQ ID NO: 816 - protein, 7 aa, Synthetic construct
DGSNLAR

SEQ ID NO: 817 - protein, 7 aa, Synthetic construct
RRDNLLR

SEQ ID NO: 818 - protein, 7 aa, Synthetic construct
RREHLVR

SEQ ID NO: 819 - protein, 7 aa, Synthetic construct
VDHHLRR

SEQ ID NO: 820 - protein, 7 aa, Synthetic construct
RKQHLQL

SEQ ID NO: 821 - protein, 7 aa, Synthetic construct
DRGNLTR

SEQ ID NO: 822 - protein, 7 aa, Synthetic construct
RPDNLVR

SEQ ID NO: 823 - protein, 7 aa, Synthetic construct
RIDKLGG

SEQ ID NO: 824 - protein, 7 aa, Synthetic construct
EAHHLSR

SEQ ID NO: 825 - protein, 7 aa, Synthetic construct
QGRSLRA

SEQ ID NO: 826 - protein, 7 aa, Synthetic construct
EAHHLSR

SEQ ID NO: 827 - protein, 7 aa, Synthetic construct
QPHGLRA

SEQ ID NO: 828 - protein, 7 aa, Synthetic construct
LKEHLTR

SEQ ID NO: 829 - protein, 7 aa, Synthetic construct
MGHHLKR

SEQ ID NO: 830 - protein, 7 aa, Synthetic construct
QRGNLLR

SEQ ID NO: 831 - protein, 7 aa, Synthetic construct
RPDALPR

SEQ ID NO: 832 - protein, 7 aa, Synthetic construct
RRQHLQY

SEQ ID NO: 833 - protein, 7 aa, Synthetic construct
LKEHLTR

SEQ ID NO: 834 - protein, 7 aa, Synthetic construct
SKQKLQV

SEQ ID NO: 835 - protein, 7 aa, Synthetic construct
QQTNLTR

SEQ ID NO: 836 - protein, 7 aa, Synthetic construct
RREVLEN

SEQ ID NO: 837 - protein, 7 aa, Synthetic construct
RPDGLAR

SEQ ID NO: 838 - protein, 7 aa, Synthetic construct
RRQHLTL

SEQ ID NO: 839 - protein, 7 aa, Synthetic construct
DNSHLQR

SEQ ID NO: 840 - protein, 7 aa, Synthetic construct
LPHHLQR

SEQ ID NO: 841 - protein, 7 aa, Synthetic construct
QSNNLTR

SEQ ID NO: 842 - protein, 7 aa, Synthetic construct
RNFILQR

SEQ ID NO: 843 - protein, 7 aa, Synthetic construct
RKDDLKR

SEQ ID NO: 844 - protein, 7 aa, Synthetic construct
RQEHLVR

SEQ ID NO: 845 - protein, 7 aa, Synthetic construct
EGGNLMR

SEQ ID NO: 846 - protein, 7 aa, Synthetic construct
RPDNLVR

SEQ ID NO: 847 - protein, 7 aa, Synthetic construct
RIDKLGG

SEQ ID NO: 848 - protein, 7 aa, Synthetic construct
RRDDLTR

SEQ ID NO: 849 - protein, 7 aa, Synthetic construct
RKDLLHR

SEQ ID NO: 850 - protein, 7 aa, Synthetic construct
RREHLVR

SEQ ID NO: 851 - protein, 7 aa, Synthetic construct
DMGNLGR

SEQ ID NO: 852 - protein, 7 aa, Synthetic construct
RDDNLQR

SEQ ID NO: 853 - protein, 7 aa, Synthetic construct
RMEHLPR

SEQ ID NO: 854 - protein, 7 aa, Synthetic construct
RKEDLAR

SEQ ID NO: 855 - protein, 7 aa, Synthetic construct
RLDMLAR

SEQ ID NO: 856 - protein, 7 aa, Synthetic construct
RREHLVR

SEQ ID NO: 857 - protein, 7 aa, Synthetic construct
EHRGLKR

SEQ ID NO: 858 - protein, 7 aa, Synthetic construct
RGDNLGR

SEQ ID NO: 859 - protein, 7 aa, Synthetic construct
RSDHLSL

SEQ ID NO: 860 - protein, 7 aa, Synthetic construct
QQAHLVR

SEQ ID NO: 861 - protein, 7 aa, Synthetic construct
RDDNLRT

SEQ ID NO: 862 - protein, 7 aa, Synthetic construct
DDANLRR

SEQ ID NO: 863 - protein, 7 aa, Synthetic construct
RREVLEN

SEQ ID NO: 864 - protein, 7 aa, Synthetic construct
LKEHLTR

SEQ ID NO: 865 - protein, 7 aa, Synthetic construct
DPSNLRR

SEQ ID NO: 866 - protein, 7 aa, Synthetic construct
DSSVLRR

SEQ ID NO: 867 - protein, 7 aa, Synthetic construct
ENSKLNR

SEQ ID NO: 868 - protein, 7 aa, Synthetic construct
DRANLRR

SEQ ID NO: 869 - protein, 7 aa, Synthetic construct
RPDALSR

SEQ ID NO: 870 - protein, 7 aa, Synthetic construct
LKEHLTR

SEQ ID NO: 871 - protein, 7 aa, Synthetic construct
DPSNLRR

SEQ ID NO: 872 - protein, 7 aa, Synthetic construct
DSSVLRR

SEQ ID NO: 873 - protein, 7 aa, Synthetic construct
ENSKLNR

SEQ ID NO: 874 - protein, 7 aa, Synthetic construct
LSQTLKR

SEQ ID NO: 875 - protein, 7 aa, Synthetic construct
RTDTLAR

SEQ ID NO: 876 - protein, 7 aa, Synthetic construct
QMETLKR

SEQ ID NO: 877 - protein, 7 aa, Synthetic construct
QGGTLRR

SEQ ID NO: 878 - protein, 7 aa, Synthetic construct
HKSSLTR

SEQ ID NO: 879 - protein, 7 aa, Synthetic construct
DRTPLQR

SEQ ID NO: 880 - protein, 7 aa, Synthetic construct
RTDTLAR

SEQ ID NO: 881 - protein, 7 aa, Synthetic construct
RKTALNR

SEQ ID NO: 882 - protein, 7 aa, Synthetic construct
RNESLKV

SEQ ID NO: 883 - protein, 7 aa, Synthetic construct
VKNTLTR

SEQ ID NO: 884 - protein, 7 aa, Synthetic construct
RREHLVR

SEQ ID NO: 885 - protein, 7 aa, Synthetic construct
LTHNLRR

SEQ ID NO: 886 - protein, 7 aa, Synthetic construct
RLDNLDR

SEQ ID NO: 887 - protein, 7 aa, Synthetic construct
RADNLRR

SEQ ID NO: 888 - protein, 7 aa, Synthetic construct
SHWKLHT

SEQ ID NO: 889 - protein, 7 aa, Synthetic construct
EKGHLNR

SEQ ID NO: 890 - protein, 7 aa, Synthetic construct
RREVLEN

SEQ ID NO: 891 - protein, 7 aa, Synthetic construct
RADGLQL

SEQ ID NO: 892 - protein, 7 aa, Synthetic construct
QSPHLKR

SEQ ID NO: 893 - protein, 7 aa, Synthetic construct
QSTSLQR

SEQ ID NO: 894 - protein, 7 aa, Synthetic construct
RKQHLTL

SEQ ID NO: 895 - protein, 7 aa, Synthetic construct
DRGNLTR

SEQ ID NO: 896 - protein, 7 aa, Synthetic construct
RPHNLLR

SEQ ID NO: 897 - protein, 7 aa, Synthetic construct
RREHLVR

SEQ ID NO: 898 - protein, 7 aa, Synthetic construct
QQAHLVR

SEQ ID NO: 899 - protein, 7 aa, Synthetic construct
QAETLKR

SEQ ID NO: 900 - protein, 7 aa, Synthetic construct
RKQHLTL

SEQ ID NO: 901 - protein, 7 aa, Synthetic construct
DRGNLTR

SEQ ID NO: 902 - protein, 7 aa, Synthetic construct
RNTNLTR

SEQ ID NO: 903 - protein, 7 aa, Synthetic construct
RREHLVR

SEQ ID NO: 904 - protein, 7 aa, Synthetic construct
RREHLVR

SEQ ID NO: 905 - protein, 7 aa, Synthetic construct
DPSNLQR

SEQ ID NO: 906 - protein, 7 aa, Synthetic construct
RNTNLTR

SEQ ID NO: 907 - protein, 7 aa, Synthetic construct
RREHLVR

SEQ ID NO: 908 - protein, 7 aa, Synthetic construct
RTDTLAR

SEQ ID NO: 909 - protein, 7 aa, Synthetic construct
RVDDLGR

SEQ ID NO: 910 - protein, 7 aa, Synthetic construct
QSHSLKS

SEQ ID NO: 911 - protein, 7 aa, Synthetic construct
ESGHLKR

SEQ ID NO: 912 - protein, 7 aa, Synthetic construct
DLSTLRR

SEQ ID NO: 913 - protein, 7 aa, Synthetic construct
QNEHLKV

SEQ ID NO: 914 - protein, 7 aa, Synthetic construct
RPENLNR

SEQ ID NO: 915 - protein, 7 aa, Synthetic construct
RRDNLNR

SEQ ID NO: 916 - protein, 7 aa, Synthetic construct
ERRGLDR

SEQ ID NO: 917 - protein, 7 aa, Synthetic construct
DRGNLTR

SEQ ID NO: 918 - protein, 7 aa, Synthetic construct
LSQTLNR

SEQ ID NO: 919 - protein, 7 aa, Synthetic construct
IKHHLGR

SEQ ID NO: 920 - protein, 7 aa, Synthetic construct
RNFILQR

SEQ ID NO: 921 - protein, 7 aa, Synthetic construct
ERHQLVR

SEQ ID NO: 922 - protein, 7 aa, Synthetic construct
QREHLVT

SEQ ID NO: 923 - protein, 7 aa, Synthetic construct
RIDNLGR

SEQ ID NO: 924 - protein, 7 aa, Synthetic construct
RMSNLVR

SEQ ID NO: 925 - protein, 7 aa, Synthetic construct
RNESLKV

SEQ ID NO: 926 - protein, 7 aa, Synthetic construct
RADNLGR

SEQ ID NO: 927 - protein, 7 aa, Synthetic construct
ARNTLKG

SEQ ID NO: 928 - protein, 7 aa, Synthetic construct
QSHSLKS

SEQ ID NO: 929 - protein, 7 aa, Synthetic construct
EKSHLTR

SEQ ID NO: 930 - protein, 7 aa, Synthetic construct
DSPTLRR

SEQ ID NO: 931 - protein, 7 aa, Synthetic construct
QKVHLQV

SEQ ID NO: 932 - protein, 7 aa, Synthetic construct
RAENLAR

SEQ ID NO: 933 - protein, 7 aa, Synthetic construct
RRDNLLR

SEQ ID NO: 934 - protein, 7 aa, Synthetic construct
HKSSLTR

SEQ ID NO: 935 - protein, 7 aa, Synthetic construct
RPDNLPR

SEQ ID NO: 936 - protein, 7 aa, Synthetic construct
QGTHLRN

SEQ ID NO: 937 - protein, 7 aa, Synthetic construct
RTHHLIT

SEQ ID NO: 938 - protein, 7 aa, Synthetic construct
TPSKLDR

SEQ ID NO: 939 - protein, 7 aa, Synthetic construct
RQDNLGR

SEQ ID NO: 940 - protein, 7 aa, Synthetic construct
ERAKLIR

SEQ ID NO: 941 - protein, 7 aa, Synthetic construct
DPSNLRR

SEQ ID NO: 942 - protein, 7 aa, Synthetic construct
RQDNLGR

SEQ ID NO: 943 - protein, 7 aa, Synthetic construct
DQGNLGR

SEQ ID NO: 944 - protein, 7 aa, Synthetic construct
QSAHLKR

SEQ ID NO: 945 - protein, 7 aa, Synthetic construct
QDVSLVR

SEQ ID NO: 946 - protein, 7 aa, Synthetic construct
TPSKLDR

SEQ ID NO: 947 - protein, 7 aa, Synthetic construct
LAENLRR

SEQ ID NO: 948 - protein, 7 aa, Synthetic construct
RQDNLGR

SEQ ID NO: 949 - protein, 7 aa, Synthetic construct
DGGNLGR

SEQ ID NO: 950 - protein, 7 aa, Synthetic construct
QSPHLKR

SEQ ID NO: 951 - protein, 7 aa, Synthetic construct
QSTSLQR

SEQ ID NO: 952 - protein, 7 aa, Synthetic construct
TPSKLDR

SEQ ID NO: 953 - protein, 7 aa, Synthetic construct
DSSNLRR

SEQ ID NO: 954 - protein, 7 aa, Synthetic construct
RQDNLGR

SEQ ID NO: 955 - protein, 7 aa, Synthetic construct
EGGNLMR

SEQ ID NO: 956 - protein, 7 aa, Synthetic construct
QQAHLVR

SEQ ID NO: 957 - protein, 7 aa, Synthetic construct
QAETLKR

SEQ ID NO: 958 - protein, 7 aa, Synthetic construct
QRPHLTN

SEQ ID NO: 959 - protein, 7 aa, Synthetic construct
QAATLQR

SEQ ID NO: 960 - protein, 7 aa, Synthetic construct
RKECLVV

SEQ ID NO: 961 - protein, 7 aa, Synthetic construct
QNPHLLR

SEQ ID NO: 962 - protein, 7 aa, Synthetic construct
QSAHLKR

SEQ ID NO: 963 - protein, 7 aa, Synthetic construct
RSDHLSL

SEQ ID NO: 964 - protein, 7 aa, Synthetic construct
DPSVLTR

SEQ ID NO: 965 - protein, 7 aa, Synthetic construct
EHRGLKR

SEQ ID NO: 966 - protein, 7 aa, Synthetic construct
VPSKLKR

SEQ ID NO: 967 - protein, 7 aa, Synthetic construct
RDDTLVR

SEQ ID NO: 968 - protein, 7 aa, Synthetic construct
QKETLNR

SEQ ID NO: 969 - protein, 7 aa, Synthetic construct
VRSSLRR

SEQ ID NO: 970 - protein, 7 aa, Synthetic construct
DPSVLTR

SEQ ID NO: 971 - protein, 7 aa, Synthetic construct
EHRGLKR

SEQ ID NO: 972 - protein, 7 aa, Synthetic construct
KTDHLAR

SEQ ID NO: 973 - protein, 7 aa, Synthetic construct
DKAHLVR

SEQ ID NO: 974 - protein, 7 aa, Synthetic construct
QKETLNR

SEQ ID NO: 975 - protein, 7 aa, Synthetic construct
VRSSLRR

SEQ ID NO: 976 - protein, 7 aa, Synthetic construct
RADNLGR

SEQ ID NO: 977 - protein, 7 aa, Synthetic construct
KQVTLRN

SEQ ID NO: 978 - protein, 7 aa, Synthetic construct
KHSNLTR

SEQ ID NO: 979 - protein, 7 aa, Synthetic construct
RREHLVR

SEQ ID NO: 980 - protein, 7 aa, Synthetic construct
VKSSLTR

SEQ ID NO: 981 - protein, 7 aa, Synthetic construct
VSNSLNR

SEQ ID NO: 982 - protein, 7 aa, Synthetic construct
RDDNLQR

SEQ ID NO: 983 - protein, 7 aa, Synthetic construct
KNVTLTN

SEQ ID NO: 984 - protein, 7 aa, Synthetic construct
QSAHLKR

SEQ ID NO: 985 - protein, 7 aa, Synthetic construct
RSDHLSL

SEQ ID NO: 986 - protein, 7 aa, Synthetic construct
VKSSLTR

SEQ ID NO: 987 - protein, 7 aa, Synthetic construct
VSNSLNR

SEQ ID NO: 988 - protein, 7 aa, Synthetic construct
DPSVLKR

SEQ ID NO: 989 - protein, 7 aa, Synthetic construct
RTEHLAR

SEQ ID NO: 990 - protein, 7 aa, Synthetic construct
QSPHLKR

SEQ ID NO: 991 - protein, 7 aa, Synthetic construct
DQTTLRR

SEQ ID NO: 992 - protein, 7 aa, Synthetic construct
KHSNLTR

SEQ ID NO: 993 - protein, 7 aa, Synthetic construct
QMETLKR

SEQ ID NO: 994 - protein, 7 aa, Synthetic construct
QNQNLAR

SEQ ID NO: 995 - protein, 7 aa, Synthetic construct
DKSVLAR

SEQ ID NO: 996 - protein, 7 aa, Synthetic construct
RDDNLQR

SEQ ID NO: 997 - protein, 7 aa, Synthetic construct
KNVTLTN

SEQ ID NO: 998 - protein, 7 aa, Synthetic construct
QSAHLKR

SEQ ID NO: 999 - protein, 7 aa, Synthetic construct
RSDHLSL

SEQ ID NO: 1000 - protein, 7 aa, Synthetic construct
KHSNLTR

SEQ ID NO: 1001 - protein, 7 aa, Synthetic construct
RREHLTI

SEQ ID NO: 1002 - protein, 7 aa, Synthetic construct
KKDHLHR

SEQ ID NO: 1003 - protein, 7 aa, Synthetic construct
QTTTLKR

SEQ ID NO: 1004 - protein, 7 aa, Synthetic construct
EEHHLTR

SEQ ID NO: 1005 - protein, 7 aa, Synthetic construct
REDVLGR

SEQ ID NO: 1006 - protein, 7 aa, Synthetic construct
KHSNLTR

SEQ ID NO: 1007 - protein, 7 aa, Synthetic construct
RREHLTI

SEQ ID NO: 1008 - protein, 7 aa, Synthetic construct
KKDHLHR

SEQ ID NO: 1009 - protein, 7 aa, Synthetic construct
QTTTLKR

SEQ ID NO: 1010 - protein, 7 aa, Synthetic construct
EAHHLSR

SEQ ID NO: 1011 - protein, 7 aa, Synthetic construct
RTDDLGR

SEQ ID NO: 1012 - protein, 7 aa, Synthetic construct
LRQTLAR

SEQ ID NO: 1013 - protein, 7 aa, Synthetic construct
VAHSLKR

SEQ ID NO: 1014 - protein, 7 aa, Synthetic construct
DRSVLVR

SEQ ID NO: 1015 - protein, 7 aa, Synthetic construct
QNSHLRR

SEQ ID NO: 1016 - protein, 7 aa, Synthetic construct
VKHSLQR

SEQ ID NO: 1017 - protein, 7 aa, Synthetic construct
QTTHLSR

SEQ ID NO: 1018 - protein, 7 aa, Synthetic construct
QSAHLKR

SEQ ID NO: 1019 - protein, 7 aa, Synthetic construct
QMSHLKR

SEQ ID NO: 1020 - protein, 7 aa, Synthetic construct
RGNHLRR

SEQ ID NO: 1021 - protein, 7 aa, Synthetic construct
LKEHLTR

SEQ ID NO: 1022 - protein, 7 aa, Synthetic construct
RNEHLKV

SEQ ID NO: 1023 - protein, 7 aa, Synthetic construct
QSTTLKR

SEQ ID NO: 1024 - protein, 7 aa, Synthetic construct
RKPHLDN

SEQ ID NO: 1025 - protein, 7 aa, Synthetic construct
RPDVLMR

SEQ ID NO: 1026 - protein, 7 aa, Synthetic construct
RDDNLQR

SEQ ID NO: 1027 - protein, 7 aa, Synthetic construct
RMEHLPR

SEQ ID NO: 1028 - protein, 7 aa, Synthetic construct
HQSSLTR

SEQ ID NO: 1029 - protein, 7 aa, Synthetic construct
VSNSLAR

SEQ ID NO: 1030 - protein, 7 aa, Synthetic construct
RNIHLQT

SEQ ID NO: 1031 - protein, 7 aa, Synthetic construct
RKDTLAR

SEQ ID NO: 1032 - protein, 7 aa, Synthetic construct
RADNLGR

SEQ ID NO: 1033 - protein, 7 aa, Synthetic construct
RMEHLPR

SEQ ID NO: 1034 - protein, 7 aa, Synthetic construct
HQSSLTR

SEQ ID NO: 1035 - protein, 7 aa, Synthetic construct
VSNSLAR

SEQ ID NO: 1036 - DNA, 20 bp, Homo sapiens
  source 1..20: mol_type = genomic DNA
ggtgctagccttgcgttccg

SEQ ID NO: 1037 - DNA, 20 bp, Homo sapiens
  source 1..20: mol_type = genomic DNA
ctggccgaagcacccgagca

SEQ ID NO: 1038 - DNA, 20 bp, Homo sapiens
  source 1..20: mol_type = genomic DNA
tgcggaaaccttctagggtg

SEQ ID NO: 1039 - skipped

SEQ ID NO: 1040 - DNA, 20 bp, Homo sapiens
  source 1..20: mol_type = genomic DNA
tcaagcacccacaccctaga

SEQ ID NO: 1041 - DNA, 20 bp, Homo sapiens
  source 1..20: mol_type = genomic DNA
gggtgtgggtgcttgacgcc

SEQ ID NO: 1042 - DNA, 20 bp, Homo sapiens
  source 1..20: mol_type = genomic DNA
ggtgtgggtgcttgacgcct

SEQ ID NO: 1043 - DNA, 20 bp, Homo sapiens
  source 1..20: mol_type = genomic DNA
gtgtgggtgcttgacgcctg

SEQ ID NO: 1044 - skipped

SEQ ID NO: 1045 - DNA, 20 bp, Homo sapiens
  source 1..20: mol_type = genomic DNA
tcacgccaccagagccccat

SEQ ID NO: 1046 - skipped

SEQ ID NO: 1047 - DNA, 20 bp, Homo sapiens
  source 1..20: mol_type = genomic DNA
aggatcgtccgatggggctc

SEQ ID NO: 1048 - DNA, 20 bp, Homo sapiens
  source 1..20: mol_type = genomic DNA
tcagataggatcgtccgatg

SEQ ID NO: 1049 - DNA, 20 bp, Homo sapiens
  source 1..20: mol_type = genomic DNA
gcggctcccagctcccagcc

SEQ ID NO: 1050 - DNA, 20 bp, Homo sapiens
  source 1..20: mol_type = genomic DNA
cggaatcctggctgggagct

SEQ ID NO: 1051 - DNA, 20 bp, Homo sapiens
  source 1..20: mol_type = genomic DNA
gcggaatcctggctgggagc

SEQ ID NO: 1052 - DNA, 20 bp, Homo sapiens
  source 1..20: mol_type = genomic DNA
gggcgcgcggaatcctggct

SEQ ID NO: 1053 - DNA, 20 bp, Homo sapiens
  source 1..20: mol_type = genomic DNA
ggggcgcgcggaatcctggc

SEQ ID NO: 1054 - DNA, 20 bp, Homo sapiens
  source 1..20: mol_type = genomic DNA
tgaggtctttgcaaacaaag

SEQ ID NO: 1055 - DNA, 20 bp, Homo sapiens
  source 1..20: mol_type = genomic DNA
ccagcacctagattcagagc

SEQ ID NO: 1056 - DNA, 20 bp, Homo sapiens
  source 1..20: mol_type = genomic DNA
cctgctctgaatctaggtgc

SEQ ID NO: 1057 - DNA, 20 bp, Homo sapiens
  source 1..20: mol_type = genomic DNA
tcgatactgggaagaaacaa

SEQ ID NO: 1058 - DNA, 20 bp, Homo sapiens
  source 1..20: mol_type = genomic DNA
ctggaagggctgtcgatact

SEQ ID NO: 1059 - DNA, 20 bp, Homo sapiens
  source 1..20: mol_type = genomic DNA
tctggaagggctgtcgatac

SEQ ID NO: 1060 - DNA, 20 bp, Homo sapiens
  source 1..20: mol_type = genomic DNA
gaggcttgctctttctggaa

SEQ ID NO: 1061 - DNA, 20 bp, Homo sapiens
  source 1..20: mol_type = genomic DNA
tgaggcttgctctttctgga

SEQ ID NO: 1062 - DNA, 20 bp, Homo sapiens
  source 1..20: mol_type = genomic DNA
gacatgaggcttgctctttc

SEQ ID NO: 1063 - DNA, 20 bp, Homo sapiens
  source 1..20: mol_type = genomic DNA
tgtacatgtggcatgacatg

SEQ ID NO: 1064 - DNA, 20 bp, Homo sapiens
  source 1..20: mol_type = genomic DNA
catgccacatgtacaatctg

SEQ ID NO: 1065 - DNA, 20 bp, Homo sapiens
  source 1..20: mol_type = genomic DNA
cacatgtacaatctgaggcc

SEQ ID NO: 1066 - DNA, 20 bp, Homo sapiens
  source 1..20: mol_type = genomic DNA
ctggcctcagattgtacatg

SEQ ID NO: 1067 - DNA, 20 bp, Homo sapiens
  source 1..20: mol_type = genomic DNA
aaaaggggaaagagagctcc

SEQ ID NO: 1068 - DNA, 20 bp, Homo sapiens
  source 1..20: mol_type = genomic DNA
ccaggcaggaggatgaaaag

SEQ ID NO: 1069 - DNA, 20 bp, Homo sapiens
  source 1..20: mol_type = genomic DNA
accaggcaggaggatgaaaa

SEQ ID NO: 1070 - DNA, 20 bp, Homo sapiens
  source 1..20: mol_type = genomic DNA
taccaggcaggaggatgaaa

SEQ ID NO: 1071 - DNA, 20 bp, Homo sapiens
  source 1..20: mol_type = genomic DNA
cctcctgcctggtacacaat

SEQ ID NO: 1072 - DNA, 20 bp, Homo sapiens
  source 1..20: mol_type = genomic DNA
cctattgtgtaccaggcagg

SEQ ID NO: 1073 - DNA, 20 bp, Homo sapiens
  source 1..20: mol_type = genomic DNA
acacctattgtgtaccaggc

SEQ ID NO: 1074 - DNA, 20 bp, Homo sapiens
  source 1..20: mol_type = genomic DNA
ggtacacaataggtgtttac

SEQ ID NO: 1075 - DNA, 20 bp, Homo sapiens
  source 1..20: mol_type = genomic DNA
gtaaacacctattgtgtacc

SEQ ID NO: 1076 - DNA, 20 bp, Homo sapiens
  source 1..20: mol_type = genomic DNA
tccagttgatttcttgaaca

SEQ ID NO: 1077 - DNA, 20 bp, Homo sapiens
  source 1..20: mol_type = genomic DNA
accatgttcaagaaatcaac

SEQ ID NO: 1078 - DNA, 20 bp, Homo sapiens
  source 1..20: mol_type = genomic DNA
tcttgaacatggtgtgtaaa

SEQ ID NO: 1079 - DNA, 20 bp, Homo sapiens
  source 1..20: mol_type = genomic DNA
tctttgcaaattgaatcttc

SEQ ID NO: 1080 - DNA, 20 bp, Homo sapiens
  source 1..20: mol_type = genomic DNA
agtttgcaaagacgtcatat

SEQ ID NO: 1081 - DNA, 20 bp, Homo sapiens
  source 1..20: mol_type = genomic DNA
gatttatactacaaagattc

SEQ ID NO: 1082 - DNA, 20 bp, Homo sapiens
  source 1..20: mol_type = genomic DNA
agttggtaaggtcagtgtgc

SEQ ID NO: 1083 - DNA, 20 bp, Homo sapiens
  source 1..20: mol_type = genomic DNA
gttggtaaggtcagtgtgca

SEQ ID NO: 1084 - DNA, 20 bp, Homo sapiens
  source 1..20: mol_type = genomic DNA
gcagggtgcataaagggcag

SEQ ID NO: 1085 - DNA, 20 bp, Homo sapiens
  source 1..20: mol_type = genomic DNA
ggtgcataaagggcagaggc

SEQ ID NO: 1086 - DNA, 20 bp, Homo sapiens
  source 1..20: mol_type = genomic DNA
gcataaagggcagaggccgg

SEQ ID NO: 1087 - DNA, 20 bp, Homo sapiens
  source 1..20: mol_type = genomic DNA
tttagaaggctgccaggtta

SEQ ID NO: 1088 - DNA, 20 bp, Homo sapiens
  source 1..20: mol_type = genomic DNA
gcccaccgaattctttccac

SEQ ID NO: 1089 - DNA, 20 bp, Homo sapiens
  source 1..20: mol_type = genomic DNA
aaagaattcggtgggcagcg

SEQ ID NO: 1090 - DNA, 20 bp, Homo sapiens
  source 1..20: mol_type = genomic DNA
cttctgaatcaatcctactg

SEQ ID NO: 1091 - DNA, 20 bp, Homo sapiens
  source 1..20: mol_type = genomic DNA
ctggtcagcaggagacaagg

SEQ ID NO: 1092 - DNA, 20 bp, Homo sapiens
  source 1..20: mol_type = genomic DNA
gattgattcagaagtctcac

SEQ ID NO: 1093 - DNA, 20 bp, Homo sapiens
  source 1..20: mol_type = genomic DNA
cagaagtctcactggtcagc

SEQ ID NO: 1094 - DNA, 20 bp, Homo sapiens
  source 1..20: mol_type = genomic DNA
tcactggtcagcaggagaca

SEQ ID NO: 1095 - DNA, 20 bp, Homo sapiens
  source 1..20: mol_type = genomic DNA
gcaggagacaaggtggaccc

SEQ ID NO: 1096 - DNA, 20 bp, Homo sapiens
  source 1..20: mol_type = genomic DNA
ggacccaggaaacactgaaa

SEQ ID NO: 1097 - DNA, 20 bp, Homo sapiens
  source 1..20: mol_type = genomic DNA
cccaggaaacactgaaaagg

SEQ ID NO: 1098 - DNA, 20 bp, Homo sapiens
  source 1..20: mol_type = genomic DNA
ccaggaaacactgaaaaggt

SEQ ID NO: 1099 - DNA, 20 bp, Homo sapiens
  source 1..20: mol_type = genomic DNA
aaacactgaaaaggtgggcc

SEQ ID NO: 1100 - DNA, 20 bp, Homo sapiens
  source 1..20: mol_type = genomic DNA
tggagtctggcatcccacgc

SEQ ID NO: 1101 - DNA, 20 bp, Homo sapiens
  source 1..20: mol_type = genomic DNA
ggagtctggcatcccacgca

SEQ ID NO: 1102 - DNA, 20 bp, Homo sapiens
  source 1..20: mol_type = genomic DNA
cgggagaggaggagccccta

SEQ ID NO: 1103 - DNA, 20 bp, Homo sapiens
  source 1..20: mol_type = genomic DNA
aggaggagcccctagggcgc

SEQ ID NO: 1104 - DNA, 20 bp, Homo sapiens
  source 1..20: mol_type = genomic DNA
aaggcaggccggcgccctag

SEQ ID NO: 1105 - DNA, 20 bp, Homo sapiens
  source 1..20: mol_type = genomic DNA
gaaggcaggccggcgcccta

SEQ ID NO: 1106 - DNA, 20 bp, Homo sapiens
  source 1..20: mol_type = genomic DNA
ggaaggcaggccggcgccct

SEQ ID NO: 1107 - DNA, 20 bp, Homo sapiens
  source 1..20: mol_type = genomic DNA
aactgggctggaaggcaggc

SEQ ID NO: 1108 - DNA, 20 bp, Homo sapiens
  source 1..20: mol_type = genomic DNA
gcctgccttccagcccagtt

SEQ ID NO: 1109 - DNA, 20 bp, Homo sapiens
  source 1..20: mol_type = genomic DNA
tcctaactgggctggaaggc

SEQ ID NO: 1110 - DNA, 20 bp, Homo sapiens
  source 1..20: mol_type = genomic DNA
cttccagcccagttaggatt

SEQ ID NO: 1111 - DNA, 20 bp, Homo sapiens
  source 1..20: mol_type = genomic DNA
ttccagcccagttaggattt

SEQ ID NO: 1112 - DNA, 20 bp, Homo sapiens
  source 1..20: mol_type = genomic DNA
caaatcctaactgggctgga

SEQ ID NO: 1113 - DNA, 20 bp, Homo sapiens
  source 1..20: mol_type = genomic DNA
ctcccaaatcctaactgggc

SEQ ID NO: 1114 - DNA, 20 bp, Homo sapiens
  source 1..20: mol_type = genomic DNA
aaaactcccaaatcctaact

SEQ ID NO: 1115 - DNA, 20 bp, Homo sapiens
  source 1..20: mol_type = genomic DNA
aaaaactcccaaatcctaac

SEQ ID NO: 1116 - DNA, 20 bp, Homo sapiens
  source 1..20: mol_type = genomic DNA
agcgtcagattacgcgcaga

SEQ ID NO: 1117 - DNA, 20 bp, Homo sapiens
  source 1..20: mol_type = genomic DNA
cagcgtcagattacgcgcag

SEQ ID NO: 1118 - DNA, 20 bp, Homo sapiens
  source 1..20: mol_type = genomic DNA
gcgcgtaatctgacgctgtt

SEQ ID NO: 1119 - DNA, 20 bp, Homo sapiens
  source 1..20: mol_type = genomic DNA
cgcgtaatctgacgctgttt

SEQ ID NO: 1120 - DNA, 20 bp, Homo sapiens
  source 1..20: mol_type = genomic DNA
gcgtaatctgacgctgtttg

SEQ ID NO: 1121 - DNA, 20 bp, Homo sapiens
  source 1..20: mol_type = genomic DNA
taatctgacgctgtttgggg

SEQ ID NO: 1122 - DNA, 20 bp, Homo sapiens
  source 1..20: mol_type = genomic DNA
aatctgacgctgtttgggga

SEQ ID NO: 1123 - DNA, 20 bp, Homo sapiens
  source 1..20: mol_type = genomic DNA
gacgctgtttggggagggcg

SEQ ID NO: 1124 - DNA, 20 bp, Homo sapiens
  source 1..20: mol_type = genomic DNA
cgaaacctgatcctccagtc

SEQ ID NO: 1125 - DNA, 20 bp, Homo sapiens
  source 1..20: mol_type = genomic DNA
gaaacctgatcctccagtcc

SEQ ID NO: 1126 - DNA, 20 bp, Homo sapiens
  source 1..20: mol_type = genomic DNA
aaacctgatcctccagtccg

SEQ ID NO: 1127 - DNA, 20 bp, Homo sapiens
  source 1..20: mol_type = genomic DNA
cggactggaggatcaggttt

SEQ ID NO: 1128 - DNA, 20 bp, Homo sapiens
  source 1..20: mol_type = genomic DNA
aacctgatcctccagtccgg

SEQ ID NO: 1129 - DNA, 20 bp, Homo sapiens
  source 1..20: mol_type = genomic DNA
aacccccggactggaggatc

SEQ ID NO: 1130 - DNA, 20 bp, Homo sapiens
  source 1..20: mol_type = genomic DNA
taacggaacccccggactgg

SEQ ID NO: 1131 - DNA, 20 bp, Homo sapiens
  source 1..20: mol_type = genomic DNA
cattaacggaacccccggac

SEQ ID NO: 1132 - DNA, 20 bp, Homo sapiens
  source 1..20: mol_type = genomic DNA
ttaaacattaacggaacccc

SEQ ID NO: 1133 - DNA, 20 bp, Homo sapiens
  source 1..20: mol_type = genomic DNA
ccgttaatgtttaatcagat

SEQ ID NO: 1134 - DNA, 20 bp, Homo sapiens
  source 1..20: mol_type = genomic DNA
cctatctgattaaacattaa

SEQ ID NO: 1135 - DNA, 20 bp, Homo sapiens
  source 1..20: mol_type = genomic DNA
aatcagataggatcgtccga

SEQ ID NO: 1136 - DNA, 20 bp, Homo sapiens
  source 1..20: mol_type = genomic DNA
atcagataggatcgtccgat

SEQ ID NO: 1137 - DNA, 20 bp, Homo sapiens
  source 1..20: mol_type = genomic DNA
tggcgtgatctgcgcgcccc

SEQ ID NO: 1138 - DNA, 20 bp, Homo sapiens
  source 1..20: mol_type = genomic DNA
gtcgctgcggaaaccttcta

SEQ ID NO: 1139 - DNA, 20 bp, Homo sapiens
  source 1..20: mol_type = genomic DNA
cgtcgctgcggaaaccttct

SEQ ID NO: 1140 - DNA, 20 bp, Homo sapiens
  source 1..20: mol_type = genomic DNA
aggtttccgcagcgacgtcg

SEQ ID NO: 1141 - DNA, 20 bp, Homo sapiens
  source 1..20: mol_type = genomic DNA
cagcgacgtcgaggcgctca

SEQ ID NO: 1142 - DNA, 20 bp, Homo sapiens
  source 1..20: mol_type = genomic DNA
tgagcgcctcgacgtcgctg

SEQ ID NO: 1143 - DNA, 20 bp, Homo sapiens
  source 1..20: mol_type = genomic DNA
gtcgaggcgctcatggttgc

SEQ ID NO: 1144 - DNA, 20 bp, Homo sapiens
  source 1..20: mol_type = genomic DNA
gaggcgctcatggttgcagg

SEQ ID NO: 1145 - DNA, 20 bp, Homo sapiens
  source 1..20: mol_type = genomic DNA
aggcgctcatggttgcaggc

SEQ ID NO: 1146 - DNA, 20 bp, Homo sapiens
  source 1..20: mol_type = genomic DNA
agttcagggtctgagcctgg

SEQ ID NO: 1147 - DNA, 20 bp, Homo sapiens
  source 1..20: mol_type = genomic DNA
cgggcgccgccgttcagttc

SEQ ID NO: 1148 - DNA, 20 bp, Homo sapiens
  source 1..20: mol_type = genomic DNA
gggcgccgccgttcagttca

SEQ ID NO: 1149 - DNA, 20 bp, Homo sapiens
  source 1..20: mol_type = genomic DNA
tcagaccctgaactgaacgg

SEQ ID NO: 1150 - DNA, 20 bp, Homo sapiens
  source 1..20: mol_type = genomic DNA
ggctcagaccctgaactgaa

SEQ ID NO: 1151 - DNA, 20 bp, Homo sapiens
  source 1..20: mol_type = genomic DNA
ttcagttcagggtctgagcc

SEQ ID NO: 1152 - DNA, 20 bp, Homo sapiens
  source 1..20: mol_type = genomic DNA
tgagcctggaggagtgagcc

SEQ ID NO: 1153 - DNA, 20 bp, Homo sapiens
  source 1..20: mol_type = genomic DNA
agtgagccaggcagtgagac

SEQ ID NO: 1154 - DNA, 20 bp, Homo sapiens
  source 1..20: mol_type = genomic DNA
gccaggcagtgagactggct

SEQ ID NO: 1155 - DNA, 20 bp, Homo sapiens
  source 1..20: mol_type = genomic DNA
ccaggcagtgagactggctc

SEQ ID NO: 1156 - DNA, 20 bp, Homo sapiens
  source 1..20: mol_type = genomic DNA
cccgagccagtctcactgcc

SEQ ID NO: 1157 - DNA, 20 bp, Homo sapiens
  source 1..20: mol_type = genomic DNA
ggcagtgagactggctcggg

SEQ ID NO: 1158 - DNA, 20 bp, Homo sapiens
  source 1..20: mol_type = genomic DNA
gcagtgagactggctcgggc

SEQ ID NO: 1159 - DNA, 20 bp, Homo sapiens
  source 1..20: mol_type = genomic DNA
tgagactggctcgggcgggc

SEQ ID NO: 1160 - DNA, 20 bp, Homo sapiens
  source 1..20: mol_type = genomic DNA
gagactggctcgggcgggcc

SEQ ID NO: 1161 - DNA, 20 bp, Homo sapiens
  source 1..20: mol_type = genomic DNA
gggacgcgtcgttgcagcag

SEQ ID NO: 1162 - DNA, 20 bp, Homo sapiens
  source 1..20: mol_type = genomic DNA
gctgctgcaacgacgcgtcc

SEQ ID NO: 1163 - DNA, 20 bp, Homo sapiens
  source 1..20: mol_type = genomic DNA
tgaaggggcgcgcggaatcc

SEQ ID NO: 1164 - DNA, 20 bp, Homo sapiens
  source 1..20: mol_type = genomic DNA
agggcgcgtgaaggggcgcg

SEQ ID NO: 1165 - DNA, 20 bp, Homo sapiens
  source 1..20: mol_type = genomic DNA
caggagcagggcgcgtgaag

SEQ ID NO: 1166 - DNA, 20 bp, Homo sapiens
  source 1..20: mol_type = genomic DNA
tcaggagcagggcgcgtgaa

SEQ ID NO: 1167 - DNA, 20 bp, Homo sapiens
  source 1..20: mol_type = genomic DNA
ttcaggagcagggcgcgtga

SEQ ID NO: 1168 - DNA, 20 bp, Homo sapiens
  source 1..20: mol_type = genomic DNA
ggagctgaagttcaggagca

SEQ ID NO: 1169 - DNA, 20 bp, Homo sapiens
  source 1..20: mol_type = genomic DNA
aggagctgaagttcaggagc

SEQ ID NO: 1170 - DNA, 20 bp, Homo sapiens
  source 1..20: mol_type = genomic DNA
ctgtgcaggagctgaagttc

SEQ ID NO: 1171 - DNA, 20 bp, Homo sapiens
  source 1..20: mol_type = genomic DNA
gcacagtcctccccaccgca

SEQ ID NO: 1172 - DNA, 20 bp, Homo sapiens
  source 1..20: mol_type = genomic DNA
tgcggtggggaggactgtgc

SEQ ID NO: 1173 - DNA, 20 bp, Homo sapiens
  source 1..20: mol_type = genomic DNA
cctccccaccgcaaggctca

SEQ ID NO: 1174 - DNA, 20 bp, Homo sapiens
  source 1..20: mol_type = genomic DNA
ccttgagccttgcggtgggg

SEQ ID NO: 1175 - DNA, 20 bp, Homo sapiens
  source 1..20: mol_type = genomic DNA
gcgccttgagccttgcggtg

SEQ ID NO: 1176 - DNA, 20 bp, Homo sapiens
  source 1..20: mol_type = genomic DNA
ggcgccttgagccttgcggt

SEQ ID NO: 1177 - DNA, 20 bp, Homo sapiens
  source 1..20: mol_type = genomic DNA
cggcgccttgagccttgcgg

SEQ ID NO: 1178 - DNA, 20 bp, Homo sapiens
  source 1..20: mol_type = genomic DNA
cgcaaggctcaaggcgccgc

SEQ ID NO: 1179 - DNA, 20 bp, Homo sapiens
  source 1..20: mol_type = genomic DNA
ggctcaaggcgccgccggcg

SEQ ID NO: 1180 - DNA, 20 bp, Homo sapiens
  source 1..20: mol_type = genomic DNA
aggccgtgcgcggtccacgc

SEQ ID NO: 1181 - DNA, 20 bp, Homo sapiens
  source 1..20: mol_type = genomic DNA
gtggaccgcgcacggcctct

SEQ ID NO: 1182 - DNA, 20 bp, Homo sapiens
  source 1..20: mol_type = genomic DNA
ggagacctagaggccgtgcg

SEQ ID NO: 1183 - DNA, 20 bp, Homo sapiens
  source 1..20: mol_type = genomic DNA
caggacagcaacctctcccc

SEQ ID NO: 1184 - DNA, 20 bp, Homo sapiens
  source 1..20: mol_type = genomic DNA
tgggcaccgtcagctccagg

SEQ ID NO: 1185 - DNA, 20 bp, Homo sapiens
  source 1..20: mol_type = genomic DNA
ccgtcagctccaggcggtcc

SEQ ID NO: 1186 - DNA, 20 bp, Homo sapiens
  source 1..20: mol_type = genomic DNA
ccaggaccgcctggagctga

SEQ ID NO: 1187 - DNA, 20 bp, Homo sapiens
  source 1..20: mol_type = genomic DNA
tcagctccaggcggtcctgg

SEQ ID NO: 1188 - DNA, 20 bp, Homo sapiens
  source 1..20: mol_type = genomic DNA
cagcggccaccaggaccgcc

SEQ ID NO: 1189 - DNA, 20 bp, Homo sapiens
  source 1..20: mol_type = genomic DNA
ctgctgctcctgggtcccgc

SEQ ID NO: 1190 - DNA, 20 bp, Homo sapiens
  source 1..20: mol_type = genomic DNA
cacgggcgcccgcgggaccc

SEQ ID NO: 1191 - DNA, 20 bp, Homo sapiens
  source 1..20: mol_type = genomic DNA
tcccgcgggcgcccgtgcgc

SEQ ID NO: 1192 - DNA, 20 bp, Homo sapiens
  source 1..20: mol_type = genomic DNA
cgcgggcgcccgtgcgcagg

SEQ ID NO: 1193 - DNA, 20 bp, Homo sapiens
  source 1..20: mol_type = genomic DNA
tcctgcgcacgggcgcccgc

SEQ ID NO: 1194 - DNA, 20 bp, Homo sapiens
  source 1..20: mol_type = genomic DNA
ctcctgcgcacgggcgcccg

SEQ ID NO: 1195 - DNA, 20 bp, Homo sapiens
  source 1..20: mol_type = genomic DNA
cgcccgtgcgcaggaggacg

SEQ ID NO: 1196 - DNA, 20 bp, Homo sapiens
  source 1..20: mol_type = genomic DNA
cgtgcgcaggaggacgagga

SEQ ID NO: 1197 - DNA, 20 bp, Homo sapiens
  source 1..20: mol_type = genomic DNA
gtcctcgtcctcctgcgcac

SEQ ID NO: 1198 - DNA, 20 bp, Homo sapiens
  source 1..20: mol_type = genomic DNA
cgtcctcgtcctcctgcgca

SEQ ID NO: 1199 - DNA, 20 bp, Homo sapiens
  source 1..20: mol_type = genomic DNA
ggacgaggacggcgactacg

SEQ ID NO: 1200 - DNA, 20 bp, Homo sapiens
  source 1..20: mol_type = genomic DNA
ggacggcgactacgaggagc

SEQ ID NO: 1201 - DNA, 20 bp, Homo sapiens
  source 1..20: mol_type = genomic DNA
gctagccttgcgttccgagg

SEQ ID NO: 1202 - DNA, 20 bp, Homo sapiens
  source 1..20: mol_type = genomic DNA
gccttgcgttccgaggagga

SEQ ID NO: 1203 - DNA, 20 bp, Homo sapiens
  source 1..20: mol_type = genomic DNA
gccgtcctcctcggaacgca

SEQ ID NO: 1204 - DNA, 20 bp, Homo sapiens
  source 1..20: mol_type = genomic DNA
gcgttccgaggaggacggcc

SEQ ID NO: 1205 - DNA, 20 bp, Homo sapiens
  source 1..20: mol_type = genomic DNA
ttcggccaggccgtcctcct

SEQ ID NO: 1206 - DNA, 20 bp, Homo sapiens
  source 1..20: mol_type = genomic DNA
cgtgctcgggtgcttcggcc

SEQ ID NO: 1207 - DNA, 20 bp, Homo sapiens
  source 1..20: mol_type = genomic DNA
gtggctgtggttccgtgctc

SEQ ID NO: 1208 - DNA, 20 bp, Homo sapiens
  source 1..20: mol_type = genomic DNA
ggtggctgtggttccgtgct

SEQ ID NO: 1209 - DNA, 20 bp, Homo sapiens
  source 1..20: mol_type = genomic DNA
gcagcggtggaaggtggctg

SEQ ID NO: 1210 - DNA, 20 bp, Homo sapiens
  source 1..20: mol_type = genomic DNA
caccttccaccgctgcgcca

SEQ ID NO: 1211 - DNA, 20 bp, Homo sapiens
  source 1..20: mol_type = genomic DNA
cttggcgcagcggtggaagg

SEQ ID NO: 1212 - DNA, 20 bp, Homo sapiens
  source 1..20: mol_type = genomic DNA
caccttggcgcagcggtgga

SEQ ID NO: 1213 - DNA, 20 bp, Homo sapiens
  source 1..20: mol_type = genomic DNA
tccaccgctgcgccaaggtg

SEQ ID NO: 1214 - DNA, 20 bp, Homo sapiens
  source 1..20: mol_type = genomic DNA
ccaccgctgcgccaaggtgc

SEQ ID NO: 1215 - skipped

SEQ ID NO: 1216 - DNA, 20 bp, Homo sapiens
  source 1..20: mol_type = genomic DNA
gggcgaacccgcagccggga

SEQ ID NO: 1217 - DNA, 20 bp, Homo sapiens
  source 1..20: mol_type = genomic DNA
tcccggctgcgggttcgccc

SEQ ID NO: 1218 - DNA, 20 bp, Homo sapiens
  source 1..20: mol_type = genomic DNA
caccgcaccgtcccggctgc

SEQ ID NO: 1219 - DNA, 20 bp, Homo sapiens
  source 1..20: mol_type = genomic DNA
gcaccgcaccgtcccggctg

SEQ ID NO: 1220 - DNA, 20 bp, Homo sapiens
  source 1..20: mol_type = genomic DNA
gaaacagcaccgcaccgtcc

SEQ ID NO: 1221 - DNA, 20 bp, Homo sapiens
  source 1..20: mol_type = genomic DNA
ggtgcggtgctgtttcctct

SEQ ID NO: 1222 - DNA, 20 bp, Homo sapiens
  source 1..20: mol_type = genomic DNA
gtgcggtgctgtttcctctc

SEQ ID NO: 1223 - DNA, 20 bp, Homo sapiens
  source 1..20: mol_type = genomic DNA
gggggaaactgaggcccgag

SEQ ID NO: 1224 - DNA, 20 bp, Homo sapiens
  source 1..20: mol_type = genomic DNA
agtttccccccatgtaagag

SEQ ID NO: 1225 - DNA, 20 bp, Homo sapiens
  source 1..20: mol_type = genomic DNA
cccccatgtaagagaggaag

SEQ ID NO: 1226 - DNA, 20 bp, Homo sapiens
  source 1..20: mol_type = genomic DNA
cacttcctctcttacatggg

SEQ ID NO: 1227 - DNA, 20 bp, Homo sapiens
  source 1..20: mol_type = genomic DNA
ccacttcctctcttacatgg

SEQ ID NO: 1228 - DNA, 20 bp, Homo sapiens
  source 1..20: mol_type = genomic DNA
taagagaggaagtggagtgc

SEQ ID NO: 1229 - DNA, 20 bp, Homo sapiens
  source 1..20: mol_type = genomic DNA
gtcgccgagggctcttcgct

SEQ ID NO: 1230 - DNA, 20 bp, Homo sapiens
  source 1..20: mol_type = genomic DNA
cgtgccaagcgaagagccct

SEQ ID NO: 1231 - DNA, 20 bp, Homo sapiens
  source 1..20: mol_type = genomic DNA
ctcttcgcttggcacgatct

SEQ ID NO: 1232 - DNA, 20 bp, Homo sapiens
  source 1..20: mol_type = genomic DNA
tcttcgcttggcacgatctt

SEQ ID NO: 1233 - DNA, 20 bp, Homo sapiens
  source 1..20: mol_type = genomic DNA
cttcgcttggcacgatcttg

SEQ ID NO: 1234 - DNA, 20 bp, Homo sapiens
  source 1..20: mol_type = genomic DNA
ggcacgatcttggggactgc

SEQ ID NO: 1235 - DNA, 20 bp, Homo sapiens
  source 1..20: mol_type = genomic DNA
gatcttggggactgcaggca

SEQ ID NO: 1236 - DNA, 20 bp, Homo sapiens
  source 1..20: mol_type = genomic DNA
cttggggactgcaggcaagg

SEQ ID NO: 1237 - DNA, 20 bp, Homo sapiens
  source 1..20: mol_type = genomic DNA
ggactgcaggcaaggcggcg

SEQ ID NO: 1238 - DNA, 20 bp, Homo sapiens
  source 1..20: mol_type = genomic DNA
gactgcaggcaaggcggcgg

SEQ ID NO: 1239 - DNA, 20 bp, Homo sapiens
  source 1..20: mol_type = genomic DNA
tgcaggcaaggcggcggggg

SEQ ID NO: 1240 - DNA, 20 bp, Homo sapiens
  source 1..20: mol_type = genomic DNA
ggcaaggcggcgggggagga

SEQ ID NO: 1241 - DNA, 20 bp, Homo sapiens
  source 1..20: mol_type = genomic DNA
gcaaggcggcgggggaggac

SEQ ID NO: 1242 - DNA, 20 bp, Homo sapiens
  source 1..20: mol_type = genomic DNA
gtggggagcacggtggagag

SEQ ID NO: 1243 - DNA, 20 bp, Homo sapiens
  source 1..20: mol_type = genomic DNA
tggggagcacggtggagagc

SEQ ID NO: 1244 - DNA, 20 bp, Homo sapiens
  source 1..20: mol_type = genomic DNA
ggggagcacggtggagagcg

SEQ ID NO: 1245 - DNA, 20 bp, Homo sapiens
  source 1..20: mol_type = genomic DNA
agcacggtggagagcgggga

SEQ ID NO: 1246 - DNA, 20 bp, Homo sapiens
  source 1..20: mol_type = genomic DNA
cggtggagagcggggacggc

SEQ ID NO: 1247 - DNA, 20 bp, Homo sapiens
  source 1..20: mol_type = genomic DNA
cgtgcggctgcgctattcag

SEQ ID NO: 1248 - DNA, 20 bp, Homo sapiens
  source 1..20: mol_type = genomic DNA
gtgcggctgcgctattcagt

SEQ ID NO: 1249 - DNA, 20 bp, Homo sapiens
  source 1..20: mol_type = genomic DNA
ggctgcgctattcagtggga

SEQ ID NO: 1250 - DNA, 20 bp, Homo sapiens
  source 1..20: mol_type = genomic DNA
ctattcagtgggaaggttcg

SEQ ID NO: 1251 - DNA, 20 bp, Homo sapiens
  source 1..20: mol_type = genomic DNA
tattcagtgggaaggttcgc

SEQ ID NO: 1252 - DNA, 20 bp, Homo sapiens
  source 1..20: mol_type = genomic DNA
attcagtgggaaggttcgcg

SEQ ID NO: 1253 - DNA, 20 bp, Homo sapiens
  source 1..20: mol_type = genomic DNA
agtgggaaggttcgcggggt

SEQ ID NO: 1254 - DNA, 20 bp, Homo sapiens
  source 1..20: mol_type = genomic DNA
gtgggaaggttcgcggggtt

SEQ ID NO: 1255 - DNA, 20 bp, Homo sapiens
  source 1..20: mol_type = genomic DNA
agggcgagcagagcactgcc

SEQ ID NO: 1256 - DNA, 20 bp, Homo sapiens
  source 1..20: mol_type = genomic DNA
tttctgcctcgccgcggcac

SEQ ID NO: 1257 - DNA, 20 bp, Homo sapiens
  source 1..20: mol_type = genomic DNA
ctgcctcgccgcggcacagg

SEQ ID NO: 1258 - DNA, 20 bp, Homo sapiens
  source 1..20: mol_type = genomic DNA
tgcctcgccgcggcacaggt

SEQ ID NO: 1259 - DNA, 20 bp, Homo sapiens
  source 1..20: mol_type = genomic DNA
cacccacctgtgccgcggcg

SEQ ID NO: 1260 - DNA, 20 bp, Homo sapiens
  source 1..20: mol_type = genomic DNA
tccttcacccacctgtgccg

SEQ ID NO: 1261 - DNA, 20 bp, Homo sapiens
  source 1..20: mol_type = genomic DNA
tgggtgaaggagtgaatgcc

SEQ ID NO: 1262 - RNA, 20 nt, Synthetic construct
  source 1..20: mol_type = other RNA
  modified_base 1..2: mod_base = OTHER; note = phosphorothioate linkage
  modified_base 2..3: mod_base = OTHER; note = phosphorothioate linkage
  modified_base 3..4: mod_base = OTHER; note = phosphorothioate linkage
  modified_base 17..18: mod_base = OTHER; note = phosphorothioate linkage
  modified_base 18..19: mod_base = OTHER; note = phosphorothioate linkage
  modified_base 19..20: mod_base = OTHER; note = phosphorothioate linkage
  modified_base 1: mod_base = gm
  modified_base 2: mod_base = gm
  modified_base 3: mod_base = um
  modified_base 18: mod_base = um
  modified_base 19: mod_base = um
  modified_base 20: mod_base = um
ggtgctagccttgcgttccg

SEQ ID NO: 1263 - RNA, 20 nt, Synthetic construct
  source 1..20: mol_type = other RNA
ctggccgaagcacccgagca

SEQ ID NO: 1264 - RNA, 20 nt, Synthetic construct
  source 1..20: mol_type = other RNA
  modified_base 1..2: mod_base = OTHER; note = phosphorothioate linkage
  modified_base 2..3: mod_base = OTHER; note = phosphorothioate linkage
  modified_base 3..4: mod_base = OTHER; note = phosphorothioate linkage
  modified_base 17..18: mod_base = OTHER; note = phosphorothioate linkage
  modified_base 18..19: mod_base = OTHER; note = phosphorothioate linkage
  modified_base 19..20: mod_base = OTHER; note = phosphorothioate linkage
  modified_base 1: mod_base = um
  modified_base 2: mod_base = gm
  modified_base 3: mod_base = cm
  modified_base 18: mod_base = um
  modified_base 19: mod_base = um
  modified_base 20: mod_base = um
tgcggaaaccttctagggtg

SEQ ID NO: 1265 - RNA, 20 nt, Synthetic construct
  source 1..20: mol_type = other RNA
  modified_base 1..2: mod_base = OTHER; note = phosphorothioate linkage
  modified_base 2..3: mod_base = OTHER; note = phosphorothioate linkage
  modified_base 3..4: mod_base = OTHER; note = phosphorothioate linkage
  modified_base 17..18: mod_base = OTHER; note = phosphorothioate linkage
  modified_base 18..19: mod_base = OTHER; note = phosphorothioate linkage
  modified_base 19..20: mod_base = OTHER; note = phosphorothioate linkage
  modified_base 1: mod_base = gm
  modified_base 2: mod_base = cm
  modified_base 3: mod_base = gm
  modified_base 18: mod_base = um
  modified_base 19: mod_base = um
  modified_base 20: mod_base = um
gcggaaaccttctagggtgt

SEQ ID NO: 1266 - RNA, 20 nt, Synthetic construct
  source 1..20: mol_type = other RNA
  modified_base 1..2: mod_base = OTHER; note = phosphorothioate linkage
  modified_base 2..3: mod_base = OTHER; note = phosphorothioate linkage
  modified_base 3..4: mod_base = OTHER; note = phosphorothioate linkage
  modified_base 1: mod_base = um
  modified_base 2: mod_base = cm
  modified_base 3: mod_base = OTHER; note = 2prime-O-methyladenosine
  modified_base 18: mod_base = um
  modified_base 19: mod_base = um
  modified_base 20: mod_base = um
tcaagcacccacaccctaga

SEQ ID NO: 1267 - RNA, 20 nt, Synthetic construct
  source 1..20: mol_type = other RNA
  modified_base 1..2: mod_base = OTHER; note = phosphorothioate linkage
  modified_base 2..3: mod_base = OTHER; note = phosphorothioate linkage
  modified_base 3..4: mod_base = OTHER; note = phosphorothioate linkage
  modified_base 17..18: mod_base = OTHER; note = phosphorothioate linkage
  modified_base 18..19: mod_base = OTHER; note = phosphorothioate linkage
  modified_base 19..20: mod_base = OTHER; note = phosphorothioate linkage
  modified_base 1: mod_base = gm
  modified_base 2: mod_base = gm
  modified_base 3: mod_base = gm
  modified_base 18: mod_base = um
  modified_base 19: mod_base = um
  modified_base 20: mod_base = um
gggtgtgggtgcttgacgcc

SEQ ID NO: 1268 - RNA, 20 nt, Synthetic construct
  source 1..20: mol_type = other RNA
  modified_base 1..2: mod_base = OTHER; note = phosphorothioate linkage
  modified_base 2..3: mod_base = OTHER; note = phosphorothioate linkage
  modified_base 3..4: mod_base = OTHER; note = phosphorothioate linkage
  modified_base 17..18: mod_base = OTHER; note = phosphorothioate linkage
  modified_base 18..19: mod_base = OTHER; note = phosphorothioate linkage
  modified_base 19..20: mod_base = OTHER; note = phosphorothioate linkage
  modified_base 1: mod_base = gm
  modified_base 2: mod_base = gm
  modified_base 3: mod_base = um
  modified_base 18: mod_base = um
  modified_base 19: mod_base = um
  modified_base 20: mod_base = um
ggtgtgggtgcttgacgcct

SEQ ID NO: 1269 - RNA, 20 nt, Synthetic construct
  source 1..20: mol_type = other RNA
  modified_base 1..2: mod_base = OTHER; note = phosphorothioate linkage
  modified_base 2..3: mod_base = OTHER; note = phosphorothioate linkage
  modified_base 3..4: mod_base = OTHER; note = phosphorothioate linkage
  modified_base 17..18: mod_base = OTHER; note = phosphorothioate linkage
  modified_base 18..19: mod_base = OTHER; note = phosphorothioate linkage
  modified_base 19..20: mod_base = OTHER; note = phosphorothioate linkage
  modified_base 1: mod_base = gm
  modified_base 2: mod_base = um
  modified_base 3: mod_base = gm
  modified_base 18: mod_base = um
  modified_base 19: mod_base = um
  modified_base 20: mod_base = um
gtgtgggtgcttgacgcctg

SEQ ID NO: 1270 - RNA, 20 nt, Synthetic construct
  source 1..20: mol_type = other RNA
  modified_base 1: mod_base = OTHER; note = 2prime-O-methyladenosine
  modified_base 2: mod_base = cm
  modified_base 3: mod_base = um
  modified_base 18: mod_base = um
  modified_base 19: mod_base = um
  modified_base 20: mod_base = um
  modified_base 1..2: mod_base = OTHER; note = phosphorothioate linkage
  modified_base 2..3: mod_base = OTHER; note = phosphorothioate linkage
  modified_base 3..4: mod_base = OTHER; note = phosphorothioate linkage
  modified_base 17..18: mod_base = OTHER; note = phosphorothioate linkage
  modified_base 18..19: mod_base = OTHER; note = phosphorothioate linkage
  modified_base 19..20: mod_base = OTHER; note = phosphorothioate linkage
actgcctggctcactcctcc

SEQ ID NO: 1271 - RNA, 20 nt, Synthetic construct
  source 1..20: mol_type = other RNA
tcacgccaccagagccccat

SEQ ID NO: 1272 - RNA, 20 nt, Synthetic construct
  source 1..20: mol_type = other RNA
  modified_base 1..2: mod_base = OTHER; note = phosphorothioate linkage
  modified_base 2..3: mod_base = OTHER; note = phosphorothioate linkage
  modified_base 3..4: mod_base = OTHER; note = phosphorothioate linkage
  modified_base 17..18: mod_base = OTHER; note = phosphorothioate linkage
  modified_base 18..19: mod_base = OTHER; note = phosphorothioate linkage
  modified_base 19..20: mod_base = OTHER; note = phosphorothioate linkage
  modified_base 1: mod_base = OTHER; note = 2prime-O-methyladenosine
  modified_base 2: mod_base = um
  modified_base 3: mod_base = cm
  modified_base 18: mod_base = um
  modified_base 19: mod_base = um
  modified_base 20: mod_base = um
atcgtccgatggggctctgg

SEQ ID NO: 1273 - RNA, 20 nt, Synthetic construct
  source 1..20: mol_type = other RNA
  modified_base 1..2: mod_base = OTHER; note = phosphorothioate linkage
  modified_base 2..3: mod_base = OTHER; note = phosphorothioate linkage
  modified_base 3..4: mod_base = OTHER; note = phosphorothioate linkage
  modified_base 17..18: mod_base = OTHER; note = phosphorothioate linkage
  modified_base 18..19: mod_base = OTHER; note = phosphorothioate linkage
  modified_base 19..20: mod_base = OTHER; note = phosphorothioate linkage
  modified_base 1: mod_base = OTHER; note = 2prime-O-methyladenosine
  modified_base 2: mod_base = gm
  modified_base 3: mod_base = gm
  modified_base 18: mod_base = um
  modified_base 19: mod_base = um
  modified_base 20: mod_base = um
aggatcgtccgatggggctc

SEQ ID NO: 1274 - RNA, 20 nt, Synthetic construct
  source 1..20: mol_type = other RNA
  modified_base 1..2: mod_base = OTHER; note = phosphorothioate linkage
  modified_base 2..3: mod_base = OTHER; note = phosphorothioate linkage
  modified_base 3..4: mod_base = OTHER; note = phosphorothioate linkage
  modified_base 17..18: mod_base = OTHER; note = phosphorothioate linkage
  modified_base 18..19: mod_base = OTHER; note = phosphorothioate linkage
  modified_base 19..20: mod_base = OTHER; note = phosphorothioate linkage
  modified_base 1: mod_base = um
  modified_base 2: mod_base = cm
  modified_base 3: mod_base = OTHER; note = 2prime-O-methyladenosine
  modified_base 18: mod_base = um
  modified_base 19: mod_base = um
  modified_base 20: mod_base = um
tcagataggatcgtccgatg

SEQ ID NO: 1275 - RNA, 20 nt, Synthetic construct
  source 1..20: mol_type = other RNA
gcggctcccagctcccagcc

SEQ ID NO: 1276 - RNA, 20 nt, Synthetic construct
  source 1..20: mol_type = other RNA
  modified_base 1..2: mod_base = OTHER; note = phosphorothioate linkage
  modified_base 2..3: mod_base = OTHER; note = phosphorothioate linkage
  modified_base 3..4: mod_base = OTHER; note = phosphorothioate linkage
  modified_base 17..18: mod_base = OTHER; note = phosphorothioate linkage
  modified_base 18..19: mod_base = OTHER; note = phosphorothioate linkage
  modified_base 19..20: mod_base = OTHER; note = phosphorothioate linkage
  modified_base 1: mod_base = cm
  modified_base 2: mod_base = gm
  modified_base 3: mod_base = gm
  modified_base 18: mod_base = um
  modified_base 19: mod_base = um
  modified_base 20: mod_base = um
cggaatcctggctgggagct

SEQ ID NO: 1277 - RNA, 20 nt, Synthetic construct
  source 1..20: mol_type = other RNA
gcggaatcctggctgggagc

SEQ ID NO: 1278 - RNA, 20 nt, Synthetic construct
  source 1..20: mol_type = other RNA
gggcgcgcggaatcctggct

SEQ ID NO: 1279 - RNA, 20 nt, Synthetic construct
  source 1..20: mol_type = other RNA
ggggcgcgcggaatcctggc

SEQ ID NO: 1280 - RNA, 20 nt, Synthetic construct
  source 1..20: mol_type = other RNA
tgaggtctttgcaaacaaag

SEQ ID NO: 1281 - RNA, 20 nt, Synthetic construct
  source 1..20: mol_type = other RNA
ccagcacctagattcagagc

SEQ ID NO: 1282 - RNA, 20 nt, Synthetic construct
  source 1..20: mol_type = other RNA
cctgctctgaatctaggtgc

SEQ ID NO: 1283 - RNA, 20 nt, Synthetic construct
  source 1..20: mol_type = other RNA
tcgatactgggaagaaacaa

SEQ ID NO: 1284 - RNA, 20 nt, Synthetic construct
  source 1..20: mol_type = other RNA
ctggaagggctgtcgatact

SEQ ID NO: 1285 - RNA, 20 nt, Synthetic construct
  source 1..20: mol_type = other RNA
tctggaagggctgtcgatac

SEQ ID NO: 1286 - RNA, 20 nt, Synthetic construct
  source 1..20: mol_type = other RNA
gaggcttgctctttctggaa

SEQ ID NO: 1287 - RNA, 20 nt, Synthetic construct
  source 1..20: mol_type = other RNA
tgaggcttgctctttctgga

SEQ ID NO: 1288 - RNA, 20 nt, Synthetic construct
  source 1..20: mol_type = other RNA
gacatgaggcttgctctttc

SEQ ID NO: 1289 - RNA, 20 nt, Synthetic construct
  source 1..20: mol_type = other RNA
tgtacatgtggcatgacatg

SEQ ID NO: 1290 - RNA, 20 nt, Synthetic construct
  source 1..20: mol_type = other RNA
catgccacatgtacaatctg

SEQ ID NO: 1291 - RNA, 20 nt, Synthetic construct
  source 1..20: mol_type = other RNA
cacatgtacaatctgaggcc

SEQ ID NO: 1292 - RNA, 20 nt, Synthetic construct
  source 1..20: mol_type = other RNA
ctggcctcagattgtacatg

SEQ ID NO: 1293 - RNA, 20 nt, Synthetic construct
  source 1..20: mol_type = other RNA
aaaaggggaaagagagctcc

SEQ ID NO: 1294 - RNA, 20 nt, Synthetic construct
  source 1..20: mol_type = other RNA
ccaggcaggaggatgaaaag

SEQ ID NO: 1295 - RNA, 20 nt, Synthetic construct
  source 1..20: mol_type = other RNA
accaggcaggaggatgaaaa

SEQ ID NO: 1296 - RNA, 20 nt, Synthetic construct
  source 1..20: mol_type = other RNA
taccaggcaggaggatgaaa

SEQ ID NO: 1297 - RNA, 20 nt, Synthetic construct
  source 1..20: mol_type = other RNA
cctcctgcctggtacacaat

SEQ ID NO: 1298 - RNA, 20 nt, Synthetic construct
  source 1..20: mol_type = other RNA
cctattgtgtaccaggcagg

SEQ ID NO: 1299 - RNA, 20 nt, Synthetic construct
  source 1..20: mol_type = other RNA
acacctattgtgtaccaggc

SEQ ID NO: 1300 - RNA, 20 nt, Synthetic construct
  source 1..20: mol_type = other RNA
ggtacacaataggtgtttac

SEQ ID NO: 1301 - RNA, 20 nt, Synthetic construct
  source 1..20: mol_type = other RNA
gtaaacacctattgtgtacc

SEQ ID NO: 1302 - RNA, 20 nt, Synthetic construct
  source 1..20: mol_type = other RNA
tccagttgatttcttgaaca

SEQ ID NO: 1303 - RNA, 20 nt, Synthetic construct
  source 1..20: mol_type = other RNA
accatgttcaagaaatcaac

SEQ ID NO: 1304 - RNA, 20 nt, Synthetic construct
  source 1..20: mol_type = other RNA
tcttgaacatggtgtgtaaa

SEQ ID NO: 1305 - RNA, 20 nt, Synthetic construct
  source 1..20: mol_type = other RNA
tctttgcaaattgaatcttc

SEQ ID NO: 1306 - RNA, 20 nt, Synthetic construct
  source 1..20: mol_type = other RNA
agtttgcaaagacgtcatat

SEQ ID NO: 1307 - RNA, 20 nt, Synthetic construct
  source 1..20: mol_type = other RNA
gatttatactacaaagattc

SEQ ID NO: 1308 - RNA, 20 nt, Synthetic construct
  source 1..20: mol_type = other RNA
agttggtaaggtcagtgtgc

SEQ ID NO: 1309 - RNA, 20 nt, Synthetic construct
  source 1..20: mol_type = other RNA
gttggtaaggtcagtgtgca

SEQ ID NO: 1310 - RNA, 20 nt, Synthetic construct
  source 1..20: mol_type = other RNA
gcagggtgcataaagggcag

SEQ ID NO: 1311 - RNA, 20 nt, Synthetic construct
  source 1..20: mol_type = other RNA
ggtgcataaagggcagaggc

SEQ ID NO: 1312 - RNA, 20 nt, Synthetic construct
  source 1..20: mol_type = other RNA
gcataaagggcagaggccgg

SEQ ID NO: 1313 - RNA, 20 nt, Synthetic construct
  source 1..20: mol_type = other RNA
tttagaaggctgccaggtta

SEQ ID NO: 1314 - RNA, 20 nt, Synthetic construct
  source 1..20: mol_type = other RNA
gcccaccgaattctttccac

SEQ ID NO: 1315 - RNA, 20 nt, Synthetic construct
  source 1..20: mol_type = other RNA
aaagaattcggtgggcagcg

SEQ ID NO: 1316 - RNA, 20 nt, Synthetic construct
  source 1..20: mol_type = other RNA
cttctgaatcaatcctactg

SEQ ID NO: 1317 - RNA, 20 nt, Synthetic construct
  source 1..20: mol_type = other RNA
ctggtcagcaggagacaagg

SEQ ID NO: 1318 - RNA, 20 nt, Synthetic construct
  source 1..20: mol_type = other RNA
gattgattcagaagtctcac

SEQ ID NO: 1319 - RNA, 20 nt, Synthetic construct
  source 1..20: mol_type = other RNA
cagaagtctcactggtcagc

SEQ ID NO: 1320 - RNA, 20 nt, Synthetic construct
  source 1..20: mol_type = other RNA
tcactggtcagcaggagaca

SEQ ID NO: 1321 - RNA, 20 nt, Synthetic construct
  source 1..20: mol_type = other RNA
  modified_base 1..2: mod_base = OTHER; note = phosphorothioate linkage
  modified_base 2..3: mod_base = OTHER; note = phosphorothioate linkage
  modified_base 3..4: mod_base = OTHER; note = phosphorothioate linkage
  modified_base 17..18: mod_base = OTHER; note = phosphorothioate linkage
  modified_base 18..19: mod_base = OTHER; note = phosphorothioate linkage
  modified_base 19..20: mod_base = OTHER; note = phosphorothioate linkage
  modified_base 1: mod_base = gm
  modified_base 2: mod_base = cm
  modified_base 3: mod_base = OTHER; note = 2prime-O-methyladenosine
  modified_base 18: mod_base = um
  modified_base 19: mod_base = um
  modified_base 20: mod_base = um
gcaggagacaaggtggaccc

SEQ ID NO: 1322 - RNA, 20 nt, Synthetic construct
  source 1..20: mol_type = other RNA
ggacccaggaaacactgaaa

SEQ ID NO: 1323 - RNA, 20 nt, Synthetic construct
  source 1..20: mol_type = other RNA
cccaggaaacactgaaaagg

SEQ ID NO: 1324 - RNA, 20 nt, Synthetic construct
  source 1..20: mol_type = other RNA
ccaggaaacactgaaaaggt

SEQ ID NO: 1325 - RNA, 20 nt, Synthetic construct
  source 1..20: mol_type = other RNA
aaacactgaaaaggtgggcc

SEQ ID NO: 1326 - RNA, 20 nt, Synthetic construct
  source 1..20: mol_type = other RNA
tggagtctggcatcccacgc

SEQ ID NO: 1327 - RNA, 20 nt, Synthetic construct
  source 1..20: mol_type = other RNA
ggagtctggcatcccacgca

SEQ ID NO: 1328 - RNA, 20 nt, Synthetic construct
  source 1..20: mol_type = other RNA
cgggagaggaggagccccta

SEQ ID NO: 1329 - RNA, 20 nt, Synthetic construct
  source 1..20: mol_type = other RNA
aggaggagcccctagggcgc

SEQ ID NO: 1330 - RNA, 20 nt, Synthetic construct
  source 1..20: mol_type = other RNA
aaggcaggccggcgccctag

SEQ ID NO: 1331 - RNA, 20 nt, Synthetic construct
  source 1..20: mol_type = other RNA
gaaggcaggccggcgcccta

SEQ ID NO: 1332 - RNA, 20 nt, Synthetic construct
  source 1..20: mol_type = other RNA
ggaaggcaggccggcgccct

SEQ ID NO: 1333 - RNA, 20 nt, Synthetic construct
  source 1..20: mol_type = other RNA
aactgggctggaaggcaggc

SEQ ID NO: 1334 - RNA, 20 nt, Synthetic construct
  source 1..20: mol_type = other RNA
gcctgccttccagcccagtt

SEQ ID NO: 1335 - RNA, 20 nt, Synthetic construct
  source 1..20: mol_type = other RNA
tcctaactgggctggaaggc

SEQ ID NO: 1336 - RNA, 20 nt, Synthetic construct
  source 1..20: mol_type = other RNA
cttccagcccagttaggatt

SEQ ID NO: 1337 - RNA, 20 nt, Synthetic construct
  source 1..20: mol_type = other RNA
ttccagcccagttaggattt

SEQ ID NO: 1338 - RNA, 20 nt, Synthetic construct
  source 1..20: mol_type = other RNA
  modified_base 1..2: mod_base = OTHER; note = phosphorothioate linkage
  modified_base 2..3: mod_base = OTHER; note = phosphorothioate linkage
  modified_base 3..4: mod_base = OTHER; note = phosphorothioate linkage
  modified_base 17..18: mod_base = OTHER; note = phosphorothioate linkage
  modified_base 18..19: mod_base = OTHER; note = phosphorothioate linkage
  modified_base 19..20: mod_base = OTHER; note = phosphorothioate linkage
  modified_base 1: mod_base = cm
  modified_base 2: mod_base = OTHER; note = 2prime-O-methyladenosine
  modified_base 3: mod_base = OTHER; note = 2prime-O-methyladenosine
  modified_base 18: mod_base = um
  modified_base 19: mod_base = um
  modified_base 20: mod_base = um
caaatcctaactgggctgga

SEQ ID NO: 1339 - RNA, 20 nt, Synthetic construct
  source 1..20: mol_type = other RNA
ctcccaaatcctaactgggc

SEQ ID NO: 1340 - RNA, 20 nt, Synthetic construct
  source 1..20: mol_type = other RNA
aaaactcccaaatcctaact

SEQ ID NO: 1341 - RNA, 20 nt, Synthetic construct
  source 1..20: mol_type = other RNA
aaaaactcccaaatcctaac

SEQ ID NO: 1342 - RNA, 20 nt, Synthetic construct
  source 1..20: mol_type = other RNA
agcgtcagattacgcgcaga

SEQ ID NO: 1343 - RNA, 20 nt, Synthetic construct
  source 1..20: mol_type = other RNA
cagcgtcagattacgcgcag

SEQ ID NO: 1344 - RNA, 20 nt, Synthetic construct
  source 1..20: mol_type = other RNA
gcgcgtaatctgacgctgtt

SEQ ID NO: 1345 - RNA, 20 nt, Synthetic construct
  source 1..20: mol_type = other RNA
cgcgtaatctgacgctgttt

SEQ ID NO: 1346 - RNA, 20 nt, Synthetic construct
  source 1..20: mol_type = other RNA
gcgtaatctgacgctgtttg

SEQ ID NO: 1347 - RNA, 20 nt, Synthetic construct
  source 1..20: mol_type = other RNA
taatctgacgctgtttgggg

SEQ ID NO: 1348 - RNA, 20 nt, Synthetic construct
  source 1..20: mol_type = other RNA
aatctgacgctgtttgggga

SEQ ID NO: 1349 - RNA, 20 nt, Synthetic construct
  source 1..20: mol_type = other RNA
gacgctgtttggggagggcg

SEQ ID NO: 1350 - RNA, 20 nt, Synthetic construct
  source 1..20: mol_type = other RNA
cgaaacctgatcctccagtc

SEQ ID NO: 1351 - RNA, 20 nt, Synthetic construct
  source 1..20: mol_type = other RNA
gaaacctgatcctccagtcc

SEQ ID NO: 1352 - RNA, 20 nt, Synthetic construct
  source 1..20: mol_type = other RNA
aaacctgatcctccagtccg

SEQ ID NO: 1353 - RNA, 20 nt, Synthetic construct
  source 1..20: mol_type = other RNA
  modified_base 1..2: mod_base = OTHER; note = phosphorothioate linkage
  modified_base 2..3: mod_base = OTHER; note = phosphorothioate linkage
  modified_base 3..4: mod_base = OTHER; note = phosphorothioate linkage
  modified_base 17..18: mod_base = OTHER; note = phosphorothioate linkage
  modified_base 18..19: mod_base = OTHER; note = phosphorothioate linkage
  modified_base 19..20: mod_base = OTHER; note = phosphorothioate linkage
  modified_base 1: mod_base = cm
  modified_base 2: mod_base = gm
  modified_base 3: mod_base = gm
  modified_base 18: mod_base = um
  modified_base 19: mod_base = um
  modified_base 20: mod_base = um
cggactggaggatcaggttt

SEQ ID NO: 1354 - RNA, 20 nt, Synthetic construct
  source 1..20: mol_type = other RNA
  modified_base 1..2: mod_base = OTHER; note = phosphorothioate linkage
  modified_base 2..3: mod_base = OTHER; note = phosphorothioate linkage
  modified_base 3..4: mod_base = OTHER; note = phosphorothioate linkage
  modified_base 17..18: mod_base = OTHER; note = phosphorothioate linkage
  modified_base 18..19: mod_base = OTHER; note = phosphorothioate linkage
  modified_base 19..20: mod_base = OTHER; note = phosphorothioate linkage
  modified_base 1: mod_base = OTHER; note = 2prime-O-methyladenosine
  modified_base 2: mod_base = OTHER; note = 2prime-O-methyladenosine
  modified_base 3: mod_base = cm
  modified_base 18: mod_base = um
  modified_base 19: mod_base = um
  modified_base 20: mod_base = um
aacctgatcctccagtccgg

SEQ ID NO: 1355 - RNA, 20 nt, Synthetic construct
  source 1..20: mol_type = other RNA
  modified_base 1..2: mod_base = OTHER; note = phosphorothioate linkage
  modified_base 2..3: mod_base = OTHER; note = phosphorothioate linkage
  modified_base 3..4: mod_base = OTHER; note = phosphorothioate linkage
  modified_base 17..18: mod_base = OTHER; note = phosphorothioate linkage
  modified_base 18..19: mod_base = OTHER; note = phosphorothioate linkage
  modified_base 19..20: mod_base = OTHER; note = phosphorothioate linkage
  modified_base 1: mod_base = OTHER; note = 2prime-O-methyladenosine
  modified_base 2: mod_base = OTHER; note = 2prime-O-methyladenosine
  modified_base 3: mod_base = cm
  modified_base 19: mod_base = um
  modified_base 18: mod_base = um
  modified_base 20: mod_base = um
aacccccggactggaggatc

SEQ ID NO: 1356 - RNA, 20 nt, Synthetic construct
  source 1..20: mol_type = other RNA
  modified_base 1..2: mod_base = OTHER; note = phosphorothioate linkage
  modified_base 2..3: mod_base = OTHER; note = phosphorothioate linkage
  modified_base 3..4: mod_base = OTHER; note = phosphorothioate linkage
  modified_base 17..18: mod_base = OTHER; note = phosphorothioate linkage
  modified_base 18..19: mod_base = OTHER; note = phosphorothioate linkage
  modified_base 19..20: mod_base = OTHER; note = phosphorothioate linkage
  modified_base 1: mod_base = um
  modified_base 2: mod_base = OTHER; note = 2prime-O-methyladenosine
  modified_base 3: mod_base = OTHER; note = 2prime-O-methyladenosine
  modified_base 18: mod_base = um
  modified_base 19: mod_base = um
  modified_base 20: mod_base = um
taacggaacccccggactgg

SEQ ID NO: 1357 - RNA, 20 nt, Synthetic construct
  source 1..20: mol_type = other RNA
  modified_base 1..2: mod_base = OTHER; note = phosphorothioate linkage
  modified_base 2..3: mod_base = OTHER; note = phosphorothioate linkage
  modified_base 3..4: mod_base = OTHER; note = phosphorothioate linkage
  modified_base 17..18: mod_base = OTHER; note = phosphorothioate linkage
  modified_base 18..19: mod_base = OTHER; note = phosphorothioate linkage
  modified_base 19..20: mod_base = OTHER; note = phosphorothioate linkage
  modified_base 1: mod_base = cm
  modified_base 2: mod_base = OTHER; note = 2prime-O-methyladenosine
  modified_base 3: mod_base = um
  modified_base 18: mod_base = um
  modified_base 19: mod_base = um
  modified_base 20: mod_base = um
cattaacggaacccccggac

SEQ ID NO: 1358 - RNA, 20 nt, Synthetic construct
  source 1..20: mol_type = other RNA
ttaaacattaacggaacccc

SEQ ID NO: 1359 - RNA, 20 nt, Synthetic construct
  source 1..20: mol_type = other RNA
ccgttaatgtttaatcagat

SEQ ID NO: 1360 - RNA, 20 nt, Synthetic construct
  source 1..20: mol_type = other RNA
cctatctgattaaacattaa

SEQ ID NO: 1361 - RNA, 20 nt, Synthetic construct
  source 1..20: mol_type = other RNA
aatcagataggatcgtccga

SEQ ID NO: 1362 - RNA, 20 nt, Synthetic construct
  source 1..20: mol_type = other RNA
atcagataggatcgtccgat

SEQ ID NO: 1363 - RNA, 20 nt, Synthetic construct
  source 1..20: mol_type = other RNA
  modified_base 1..2: mod_base = OTHER; note = phosphorothioate linkage
  modified_base 2..3: mod_base = OTHER; note = phosphorothioate linkage
  modified_base 3..4: mod_base = OTHER; note = phosphorothioate linkage
  modified_base 17..18: mod_base = OTHER; note = phosphorothioate linkage
  modified_base 18..19: mod_base = OTHER; note = phosphorothioate linkage
  modified_base 19..20: mod_base = OTHER; note = phosphorothioate linkage
  modified_base 1: mod_base = um
  modified_base 2: mod_base = gm
  modified_base 3: mod_base = gm
  modified_base 18: mod_base = um
  modified_base 19: mod_base = um
  modified_base 20: mod_base = um
tggcgtgatctgcgcgcccc

SEQ ID NO: 1364 - RNA, 20 nt, Synthetic construct
  source 1..20: mol_type = other RNA
gtcgctgcggaaaccttcta

SEQ ID NO: 1365 - RNA, 20 nt, Synthetic construct
  source 1..20: mol_type = other RNA
cgtcgctgcggaaaccttct

SEQ ID NO: 1366 - RNA, 20 nt, Synthetic construct
  source 1..20: mol_type = other RNA
aggtttccgcagcgacgtcg

SEQ ID NO: 1367 - RNA, 20 nt, Synthetic construct
  source 1..20: mol_type = other RNA
cagcgacgtcgaggcgctca

SEQ ID NO: 1368 - RNA, 20 nt, Synthetic construct
  source 1..20: mol_type = other RNA
  modified_base 1..2: mod_base = OTHER; note = phosphorothioate linkage
  modified_base 2..3: mod_base = OTHER; note = phosphorothioate linkage
  modified_base 3..4: mod_base = OTHER; note = phosphorothioate linkage
  modified_base 17..18: mod_base = OTHER; note = phosphorothioate linkage
  modified_base 18..19: mod_base = OTHER; note = phosphorothioate linkage
  modified_base 19..20: mod_base = OTHER; note = phosphorothioate linkage
  modified_base 1: mod_base = um
  modified_base 2: mod_base = gm
  modified_base 3: mod_base = OTHER; note = 2prime-O-methyladenosine
  modified_base 18: mod_base = um
  modified_base 19: mod_base = um
  modified_base 20: mod_base = um
tgagcgcctcgacgtcgctg

SEQ ID NO: 1369 - RNA, 20 nt, Synthetic construct
  source 1..20: mol_type = other RNA
  modified_base 1..2: mod_base = OTHER; note = phosphorothioate linkage
  modified_base 2..3: mod_base = OTHER; note = phosphorothioate linkage
  modified_base 3..4: mod_base = OTHER; note = phosphorothioate linkage
  modified_base 17..18: mod_base = OTHER; note = phosphorothioate linkage
  modified_base 18..19: mod_base = OTHER; note = phosphorothioate linkage
  modified_base 19..20: mod_base = OTHER; note = phosphorothioate linkage
  modified_base 1: mod_base = gm
  modified_base 2: mod_base = um
  modified_base 3: mod_base = cm
  modified_base 18: mod_base = um
  modified_base 19: mod_base = um
  modified_base 20: mod_base = um
gtcgaggcgctcatggttgc

SEQ ID NO: 1370 - RNA, 20 nt, Synthetic construct
  source 1..20: mol_type = other RNA
  modified_base 1..2: mod_base = OTHER; note = phosphorothioate linkage
  modified_base 2..3: mod_base = OTHER; note = phosphorothioate linkage
  modified_base 3..4: mod_base = OTHER; note = phosphorothioate linkage
  modified_base 17..18: mod_base = OTHER; note = phosphorothioate linkage
  modified_base 18..19: mod_base = OTHER; note = phosphorothioate linkage
  modified_base 19..20: mod_base = OTHER; note = phosphorothioate linkage
  modified_base 1: mod_base = gm
  modified_base 2: mod_base = OTHER; note = 2prime-O-methyladenosine
  modified_base 3: mod_base = gm
  modified_base 18: mod_base = um
  modified_base 19: mod_base = um
  modified_base 20: mod_base = um
gaggcgctcatggttgcagg

SEQ ID NO: 1371 - RNA, 20 nt, Synthetic construct
  source 1..20: mol_type = other RNA
  modified_base 1..2: mod_base = OTHER; note = phosphorothioate linkage
  modified_base 2..3: mod_base = OTHER; note = phosphorothioate linkage
  modified_base 3..4: mod_base = OTHER; note = phosphorothioate linkage
  modified_base 17..18: mod_base = OTHER; note = phosphorothioate linkage
  modified_base 18..19: mod_base = OTHER; note = phosphorothioate linkage
  modified_base 19..20: mod_base = OTHER; note = phosphorothioate linkage
  modified_base 1: mod_base = OTHER; note = 2prime-O-methyladenosine
  modified_base 2: mod_base = gm
  modified_base 3: mod_base = gm
  modified_base 18: mod_base = um
  modified_base 19: mod_base = um
  modified_base 20: mod_base = um
aggcgctcatggttgcaggc

SEQ ID NO: 1372 - RNA, 20 nt, Synthetic construct
  source 1..20: mol_type = other RNA
  modified_base 1..2: mod_base = OTHER; note = phosphorothioate linkage
  modified_base 2..3: mod_base = OTHER; note = phosphorothioate linkage
  modified_base 3..4: mod_base = OTHER; note = phosphorothioate linkage
  modified_base 17..18: mod_base = OTHER; note = phosphorothioate linkage
  modified_base 18..19: mod_base = OTHER; note = phosphorothioate linkage
  modified_base 19..20: mod_base = OTHER; note = phosphorothioate linkage
  modified_base 1: mod_base = OTHER; note = 2prime-O-methyladenosine
  modified_base 2: mod_base = gm
  modified_base 3: mod_base = um
  modified_base 18: mod_base = um
  modified_base 19: mod_base = um
  modified_base 20: mod_base = um
agttcagggtctgagcctgg

SEQ ID NO: 1373 - RNA, 20 nt, Synthetic construct
  source 1..20: mol_type = other RNA
  modified_base 1..2: mod_base = OTHER; note = phosphorothioate linkage
  modified_base 2..3: mod_base = OTHER; note = phosphorothioate linkage
  modified_base 3..4: mod_base = OTHER; note = phosphorothioate linkage
  modified_base 17..18: mod_base = OTHER; note = phosphorothioate linkage
  modified_base 18..19: mod_base = OTHER; note = phosphorothioate linkage
  modified_base 19..20: mod_base = OTHER; note = phosphorothioate linkage
  modified_base 1: mod_base = cm
  modified_base 2: mod_base = gm
  modified_base 3: mod_base = gm
  modified_base 18: mod_base = um
  modified_base 19: mod_base = um
  modified_base 20: mod_base = um
cgggcgccgccgttcagttc

SEQ ID NO: 1374 - RNA, 20 nt, Synthetic construct
  source 1..20: mol_type = other RNA
  modified_base 1..2: mod_base = OTHER; note = phosphorothioate linkage
  modified_base 2..3: mod_base = OTHER; note = phosphorothioate linkage
  modified_base 3..4: mod_base = OTHER; note = phosphorothioate linkage
  modified_base 17..18: mod_base = OTHER; note = phosphorothioate linkage
  modified_base 18..19: mod_base = OTHER; note = phosphorothioate linkage
  modified_base 19..20: mod_base = OTHER; note = phosphorothioate linkage
  modified_base 1: mod_base = gm
  modified_base 2: mod_base = gm
  modified_base 3: mod_base = gm
  modified_base 18: mod_base = um
  modified_base 19: mod_base = um
  modified_base 20: mod_base = um
gggcgccgccgttcagttca

SEQ ID NO: 1375 - RNA, 20 nt, Synthetic construct
  source 1..20: mol_type = other RNA
tcagaccctgaactgaacgg

SEQ ID NO: 1376 - RNA, 20 nt, Synthetic construct
  source 1..20: mol_type = other RNA
ggctcagaccctgaactgaa

SEQ ID NO: 1377 - RNA, 20 nt, Synthetic construct
  source 1..20: mol_type = other RNA
ttcagttcagggtctgagcc

SEQ ID NO: 1378 - RNA, 20 nt, Synthetic construct
  source 1..20: mol_type = other RNA
tgagcctggaggagtgagcc

SEQ ID NO: 1379 - RNA, 20 nt, Synthetic construct
  source 1..20: mol_type = other RNA
agtgagccaggcagtgagac

SEQ ID NO: 1380 - RNA, 20 nt, Synthetic construct
  source 1..20: mol_type = other RNA
gccaggcagtgagactggct

SEQ ID NO: 1381 - RNA, 20 nt, Synthetic construct
  source 1..20: mol_type = other RNA
ccaggcagtgagactggctc

SEQ ID NO: 1382 - RNA, 20 nt, Synthetic construct
  source 1..20: mol_type = other RNA
cccgagccagtctcactgcc

SEQ ID NO: 1383 - RNA, 20 nt, Synthetic construct
  source 1..20: mol_type = other RNA
  modified_base 1..2: mod_base = OTHER; note = phosphorothioate linkage
  modified_base 2..3: mod_base = OTHER; note = phosphorothioate linkage
  modified_base 3..4: mod_base = OTHER; note = phosphorothioate linkage
  modified_base 17..18: mod_base = OTHER; note = phosphorothioate linkage
  modified_base 18..19: mod_base = OTHER; note = phosphorothioate linkage
  modified_base 19..20: mod_base = OTHER; note = phosphorothioate linkage
  modified_base 1: mod_base = gm
  modified_base 2: mod_base = gm
  modified_base 3: mod_base = cm
  modified_base 18: mod_base = um
  modified_base 19: mod_base = um
  modified_base 20: mod_base = um
ggcagtgagactggctcggg

SEQ ID NO: 1384 - RNA, 20 nt, Synthetic construct
  source 1..20: mol_type = other RNA
gcagtgagactggctcgggc

SEQ ID NO: 1385 - RNA, 20 nt, Synthetic construct
  source 1..20: mol_type = other RNA
tgagactggctcgggcgggc

SEQ ID NO: 1386 - RNA, 20 nt, Synthetic construct
  source 1..20: mol_type = other RNA
  modified_base 1..2: mod_base = OTHER; note = phosphorothioate linkage
  modified_base 2..3: mod_base = OTHER; note = phosphorothioate linkage
  modified_base 3..4: mod_base = OTHER; note = phosphorothioate linkage
  modified_base 17..18: mod_base = OTHER; note = phosphorothioate linkage
  modified_base 18..19: mod_base = OTHER; note = phosphorothioate linkage
  modified_base 19..20: mod_base = OTHER; note = phosphorothioate linkage
  modified_base 1: mod_base = gm
  modified_base 2: mod_base = OTHER; note = 2prime-O-methyladenosine
  modified_base 3: mod_base = gm
  modified_base 18: mod_base = um
  modified_base 19: mod_base = um
  modified_base 20: mod_base = um
gagactggctcgggcgggcc

SEQ ID NO: 1387 - RNA, 20 nt, Synthetic construct
  source 1..20: mol_type = other RNA
  modified_base 1..2: mod_base = OTHER; note = phosphorothioate linkage
  modified_base 2..3: mod_base = OTHER; note = phosphorothioate linkage
  modified_base 3..4: mod_base = OTHER; note = phosphorothioate linkage
  modified_base 17..18: mod_base = OTHER; note = phosphorothioate linkage
  modified_base 18..19: mod_base = OTHER; note = phosphorothioate linkage
  modified_base 19..20: mod_base = OTHER; note = phosphorothioate linkage
  modified_base 1: mod_base = gm
  modified_base 2: mod_base = gm
  modified_base 3: mod_base = gm
  modified_base 18: mod_base = um
  modified_base 19: mod_base = um
  modified_base 20: mod_base = um
gggacgcgtcgttgcagcag

SEQ ID NO: 1388 - RNA, 20 nt, Synthetic construct
  source 1..20: mol_type = other RNA
  modified_base 1..2: mod_base = OTHER; note = phosphorothioate linkage
  modified_base 2..3: mod_base = OTHER; note = phosphorothioate linkage
  modified_base 3..4: mod_base = OTHER; note = phosphorothioate linkage
  modified_base 17..18: mod_base = OTHER; note = phosphorothioate linkage
  modified_base 18..19: mod_base = OTHER; note = phosphorothioate linkage
  modified_base 19..20: mod_base = OTHER; note = phosphorothioate linkage
  modified_base 1: mod_base = gm
  modified_base 2: mod_base = cm
  modified_base 3: mod_base = um
  modified_base 18: mod_base = um
  modified_base 19: mod_base = um
  modified_base 20: mod_base = um
gctgctgcaacgacgcgtcc

SEQ ID NO: 1389 - RNA, 20 nt, Synthetic construct
  source 1..20: mol_type = other RNA
  modified_base 1..2: mod_base = OTHER; note = phosphorothioate linkage
  modified_base 2..3: mod_base = OTHER; note = phosphorothioate linkage
  modified_base 3..4: mod_base = OTHER; note = phosphorothioate linkage
  modified_base 17..18: mod_base = OTHER; note = phosphorothioate linkage
  modified_base 18..19: mod_base = OTHER; note = phosphorothioate linkage
  modified_base 19..20: mod_base = OTHER; note = phosphorothioate linkage
  modified_base 1: mod_base = um
  modified_base 2: mod_base = gm
  modified_base 3: mod_base = OTHER; note = 2prime-O-methyladenosine
  modified_base 18: mod_base = um
  modified_base 19: mod_base = um
  modified_base 20: mod_base = um
tgaaggggcgcgcggaatcc

SEQ ID NO: 1390 - RNA, 20 nt, Synthetic construct
  source 1..20: mol_type = other RNA
agggcgcgtgaaggggcgcg

SEQ ID NO: 1391 - RNA, 20 nt, Synthetic construct
  source 1..20: mol_type = other RNA
caggagcagggcgcgtgaag

SEQ ID NO: 1392 - RNA, 20 nt, Synthetic construct
  source 1..20: mol_type = other RNA
tcaggagcagggcgcgtgaa

SEQ ID NO: 1393 - RNA, 20 nt, Synthetic construct
  source 1..20: mol_type = other RNA
ttcaggagcagggcgcgtga

SEQ ID NO: 1394 - RNA, 20 nt, Synthetic construct
  source 1..20: mol_type = other RNA
ggagctgaagttcaggagca

SEQ ID NO: 1395 - RNA, 20 nt, Synthetic construct
  source 1..20: mol_type = other RNA
aggagctgaagttcaggagc

SEQ ID NO: 1396 - RNA, 20 nt, Synthetic construct
  source 1..20: mol_type = other RNA
ctgtgcaggagctgaagttc

SEQ ID NO: 1397 - RNA, 20 nt, Synthetic construct
  source 1..20: mol_type = other RNA
  modified_base 1..2: mod_base = OTHER; note = phosphorothioate linkage
  modified_base 2..3: mod_base = OTHER; note = phosphorothioate linkage
  modified_base 3..4: mod_base = OTHER; note = phosphorothioate linkage
  modified_base 17..18: mod_base = OTHER; note = phosphorothioate linkage
  modified_base 18..19: mod_base = OTHER; note = phosphorothioate linkage
  modified_base 19..20: mod_base = OTHER; note = phosphorothioate linkage
  modified_base 1: mod_base = gm
  modified_base 2: mod_base = cm
  modified_base 3: mod_base = OTHER; note = 2prime-O-methyladenosine
  modified_base 18: mod_base = um
  modified_base 19: mod_base = um
  modified_base 20: mod_base = um
gcacagtcctccccaccgca

SEQ ID NO: 1398 - RNA, 20 nt, Synthetic construct
  source 1..20: mol_type = other RNA
tgcggtggggaggactgtgc

SEQ ID NO: 1399 - RNA, 20 nt, Synthetic construct
  source 1..20: mol_type = other RNA
cctccccaccgcaaggctca

SEQ ID NO: 1400 - RNA, 20 nt, Synthetic construct
  source 1..20: mol_type = other RNA
ccttgagccttgcggtgggg

SEQ ID NO: 1401 - RNA, 20 nt, Synthetic construct
  source 1..20: mol_type = other RNA
gcgccttgagccttgcggtg

SEQ ID NO: 1402 - RNA, 20 nt, Synthetic construct
  source 1..20: mol_type = other RNA
ggcgccttgagccttgcggt

SEQ ID NO: 1403 - RNA, 20 nt, Synthetic construct
  source 1..20: mol_type = other RNA
cggcgccttgagccttgcgg

SEQ ID NO: 1404 - RNA, 20 nt, Synthetic construct
  source 1..20: mol_type = other RNA
cgcaaggctcaaggcgccgc

SEQ ID NO: 1405 - RNA, 20 nt, Synthetic construct
  source 1..20: mol_type = other RNA
  modified_base 1..2: mod_base = OTHER; note = phosphorothioate linkage
  modified_base 2..3: mod_base = OTHER; note = phosphorothioate linkage
  modified_base 3..4: mod_base = OTHER; note = phosphorothioate linkage
  modified_base 17..18: mod_base = OTHER; note = phosphorothioate linkage
  modified_base 18..19: mod_base = OTHER; note = phosphorothioate linkage
  modified_base 19..20: mod_base = OTHER; note = phosphorothioate linkage
  modified_base 1: mod_base = gm
  modified_base 2: mod_base = gm
  modified_base 3: mod_base = cm
  modified_base 18: mod_base = um
  modified_base 19: mod_base = um
  modified_base 20: mod_base = um
ggctcaaggcgccgccggcg

SEQ ID NO: 1406 - RNA, 20 nt, Synthetic construct
  source 1..20: mol_type = other RNA
aggccgtgcgcggtccacgc

SEQ ID NO: 1407 - RNA, 20 nt, Synthetic construct
  source 1..20: mol_type = other RNA
gtggaccgcgcacggcctct

SEQ ID NO: 1408 - RNA, 20 nt, Synthetic construct
  source 1..20: mol_type = other RNA
ggagacctagaggccgtgcg

SEQ ID NO: 1409 - RNA, 20 nt, Synthetic construct
  source 1..20: mol_type = other RNA
caggacagcaacctctcccc

SEQ ID NO: 1410 - RNA, 20 nt, Synthetic construct
  source 1..20: mol_type = other RNA
tgggcaccgtcagctccagg

SEQ ID NO: 1411 - RNA, 20 nt, Synthetic construct
  source 1..20: mol_type = other RNA
ccgtcagctccaggcggtcc

SEQ ID NO: 1412 - RNA, 20 nt, Synthetic construct
  source 1..20: mol_type = other RNA
ccaggaccgcctggagctga

SEQ ID NO: 1413 - RNA, 20 nt, Synthetic construct
  source 1..20: mol_type = other RNA
tcagctccaggcggtcctgg

SEQ ID NO: 1414 - RNA, 20 nt, Synthetic construct
  source 1..20: mol_type = other RNA
cagcggccaccaggaccgcc

SEQ ID NO: 1415 - RNA, 20 nt, Synthetic construct
  source 1..20: mol_type = other RNA
ctgctgctcctgggtcccgc

SEQ ID NO: 1416 - RNA, 20 nt, Synthetic construct
  source 1..20: mol_type = other RNA
cacgggcgcccgcgggaccc

SEQ ID NO: 1417 - RNA, 20 nt, Synthetic construct
  source 1..20: mol_type = other RNA
tcccgcgggcgcccgtgcgc

SEQ ID NO: 1418 - RNA, 20 nt, Synthetic construct
  source 1..20: mol_type = other RNA
cgcgggcgcccgtgcgcagg

SEQ ID NO: 1419 - RNA, 20 nt, Synthetic construct
  source 1..20: mol_type = other RNA
tcctgcgcacgggcgcccgc

SEQ ID NO: 1420 - RNA, 20 nt, Synthetic construct
  source 1..20: mol_type = other RNA
ctcctgcgcacgggcgcccg

SEQ ID NO: 1421 - RNA, 20 nt, Synthetic construct
  source 1..20: mol_type = other RNA
cgcccgtgcgcaggaggacg

SEQ ID NO: 1422 - RNA, 20 nt, Synthetic construct
  source 1..20: mol_type = other RNA
cgtgcgcaggaggacgagga

SEQ ID NO: 1423 - RNA, 20 nt, Synthetic construct
  source 1..20: mol_type = other RNA
gtcctcgtcctcctgcgcac

SEQ ID NO: 1424 - RNA, 20 nt, Synthetic construct
  source 1..20: mol_type = other RNA
cgtcctcgtcctcctgcgca

SEQ ID NO: 1425 - RNA, 20 nt, Synthetic construct
  source 1..20: mol_type = other RNA
ggacgaggacggcgactacg

SEQ ID NO: 1426 - RNA, 20 nt, Synthetic construct
  source 1..20: mol_type = other RNA
ggacggcgactacgaggagc

SEQ ID NO: 1427 - RNA, 20 nt, Synthetic construct
  source 1..20: mol_type = other RNA
gctagccttgcgttccgagg

SEQ ID NO: 1428 - RNA, 20 nt, Synthetic construct
  source 1..20: mol_type = other RNA
gccttgcgttccgaggagga

SEQ ID NO: 1429 - RNA, 20 nt, Synthetic construct
  source 1..20: mol_type = other RNA
gccgtcctcctcggaacgca

SEQ ID NO: 1430 - RNA, 20 nt, Synthetic construct
  source 1..20: mol_type = other RNA
gcgttccgaggaggacggcc

SEQ ID NO: 1431 - RNA, 20 nt, Synthetic construct
  source 1..20: mol_type = other RNA
  modified_base 1..2: mod_base = OTHER; note = phosphorothioate linkage
  modified_base 2..3: mod_base = OTHER; note = phosphorothioate linkage
  modified_base 3..4: mod_base = OTHER; note = phosphorothioate linkage
  modified_base 17..18: mod_base = OTHER; note = phosphorothioate linkage
  modified_base 18..19: mod_base = OTHER; note = phosphorothioate linkage
  modified_base 19..20: mod_base = OTHER; note = phosphorothioate linkage
  modified_base 1: mod_base = um
  modified_base 2: mod_base = um
  modified_base 3: mod_base = cm
  modified_base 18: mod_base = um
  modified_base 19: mod_base = um
  modified_base 20: mod_base = um
ttcggccaggccgtcctcct

SEQ ID NO: 1432 - RNA, 20 nt, Synthetic construct
  source 1..20: mol_type = other RNA
cgtgctcgggtgcttcggcc

SEQ ID NO: 1433 - RNA, 20 nt, Synthetic construct
  source 1..20: mol_type = other RNA
gtggctgtggttccgtgctc

SEQ ID NO: 1434 - RNA, 20 nt, Synthetic construct
  source 1..20: mol_type = other RNA
ggtggctgtggttccgtgct

SEQ ID NO: 1435 - RNA, 20 nt, Synthetic construct
  source 1..20: mol_type = other RNA
gcagcggtggaaggtggctg

SEQ ID NO: 1436 - RNA, 20 nt, Synthetic construct
  source 1..20: mol_type = other RNA
caccttccaccgctgcgcca

SEQ ID NO: 1437 - RNA, 20 nt, Synthetic construct
  source 1..20: mol_type = other RNA
cttggcgcagcggtggaagg

SEQ ID NO: 1438 - RNA, 20 nt, Synthetic construct
  source 1..20: mol_type = other RNA
caccttggcgcagcggtgga

SEQ ID NO: 1439 - RNA, 20 nt, Synthetic construct
  source 1..20: mol_type = other RNA
tccaccgctgcgccaaggtg

SEQ ID NO: 1440 - RNA, 20 nt, Synthetic construct
  source 1..20: mol_type = other RNA
ccaccgctgcgccaaggtgc

SEQ ID NO: 1441 - RNA, 20 nt, Synthetic construct
  source 1..20: mol_type = other RNA
  modified_base 1..2: mod_base = OTHER; note = phosphorothioate linkage
  modified_base 2..3: mod_base = OTHER; note = phosphorothioate linkage
  modified_base 3..4: mod_base = OTHER; note = phosphorothioate linkage
  modified_base 17..18: mod_base = OTHER; note = phosphorothioate linkage
  modified_base 18..19: mod_base = OTHER; note = phosphorothioate linkage
  modified_base 19..20: mod_base = OTHER; note = phosphorothioate linkage
  modified_base 1: mod_base = cm
  modified_base 2: mod_base = cm
  modified_base 3: mod_base = cm
  modified_base 18: mod_base = um
  modified_base 19: mod_base = um
  modified_base 20: mod_base = um
cccgcaccttggcgcagcgg

SEQ ID NO: 1442 - RNA, 20 nt, Synthetic construct
  source 1..20: mol_type = other RNA
gggcgaacccgcagccggga

SEQ ID NO: 1443 - RNA, 20 nt, Synthetic construct
  source 1..20: mol_type = other RNA
tcccggctgcgggttcgccc

SEQ ID NO: 1444 - RNA, 20 nt, Synthetic construct
  source 1..20: mol_type = other RNA
caccgcaccgtcccggctgc

SEQ ID NO: 1445 - RNA, 20 nt, Synthetic construct
  source 1..20: mol_type = other RNA
gcaccgcaccgtcccggctg

SEQ ID NO: 1446 - RNA, 20 nt, Synthetic construct
  source 1..20: mol_type = other RNA
gaaacagcaccgcaccgtcc

SEQ ID NO: 1447 - RNA, 20 nt, Synthetic construct
  source 1..20: mol_type = other RNA
ggtgcggtgctgtttcctct

SEQ ID NO: 1448 - RNA, 20 nt, Synthetic construct
  source 1..20: mol_type = other RNA
gtgcggtgctgtttcctctc

SEQ ID NO: 1449 - RNA, 20 nt, Synthetic construct
  source 1..20: mol_type = other RNA
gggggaaactgaggcccgag

SEQ ID NO: 1450 - RNA, 20 nt, Synthetic construct
  source 1..20: mol_type = other RNA
agtttccccccatgtaagag

SEQ ID NO: 1451 - RNA, 20 nt, Synthetic construct
  source 1..20: mol_type = other RNA
cccccatgtaagagaggaag

SEQ ID NO: 1452 - RNA, 20 nt, Synthetic construct
  source 1..20: mol_type = other RNA
cacttcctctcttacatggg

SEQ ID NO: 1453 - RNA, 20 nt, Synthetic construct
  source 1..20: mol_type = other RNA
ccacttcctctcttacatgg

SEQ ID NO: 1454 - RNA, 20 nt, Synthetic construct
  source 1..20: mol_type = other RNA
taagagaggaagtggagtgc

SEQ ID NO: 1455 - RNA, 20 nt, Synthetic construct
  source 1..20: mol_type = other RNA
gtcgccgagggctcttcgct

SEQ ID NO: 1456 - RNA, 20 nt, Synthetic construct
  source 1..20: mol_type = other RNA
cgtgccaagcgaagagccct

SEQ ID NO: 1457 - RNA, 20 nt, Synthetic construct
  source 1..20: mol_type = other RNA
ctcttcgcttggcacgatct

SEQ ID NO: 1458 - RNA, 20 nt, Synthetic construct
  source 1..20: mol_type = other RNA
  modified_base 1..2: mod_base = OTHER; note = phosphorothioate linkage
  modified_base 2..3: mod_base = OTHER; note = phosphorothioate linkage
  modified_base 3..4: mod_base = OTHER; note = phosphorothioate linkage
  modified_base 17..18: mod_base = OTHER; note = phosphorothioate linkage
  modified_base 18..19: mod_base = OTHER; note = phosphorothioate linkage
  modified_base 19..20: mod_base = OTHER; note = phosphorothioate linkage
  modified_base 1: mod_base = um
  modified_base 2: mod_base = cm
  modified_base 3: mod_base = um
  modified_base 18: mod_base = um
  modified_base 19: mod_base = um
  modified_base 20: mod_base = um
tcttcgcttggcacgatctt

SEQ ID NO: 1459 - RNA, 20 nt, Synthetic construct
  source 1..20: mol_type = other RNA
cttcgcttggcacgatcttg

SEQ ID NO: 1460 - RNA, 20 nt, Synthetic construct
  source 1..20: mol_type = other RNA
ggcacgatcttggggactgc

SEQ ID NO: 1461 - RNA, 20 nt, Synthetic construct
  source 1..20: mol_type = other RNA
gatcttggggactgcaggca

SEQ ID NO: 1462 - RNA, 20 nt, Synthetic construct
  source 1..20: mol_type = other RNA
cttggggactgcaggcaagg

SEQ ID NO: 1463 - RNA, 20 nt, Synthetic construct
  source 1..20: mol_type = other RNA
ggactgcaggcaaggcggcg

SEQ ID NO: 1464 - RNA, 20 nt, Synthetic construct
  source 1..20: mol_type = other RNA
gactgcaggcaaggcggcgg

SEQ ID NO: 1465 - RNA, 20 nt, Synthetic construct
  source 1..20: mol_type = other RNA
  modified_base 1..2: mod_base = OTHER; note = phosphorothioate linkage
  modified_base 2..3: mod_base = OTHER; note = phosphorothioate linkage
  modified_base 3..4: mod_base = OTHER; note = phosphorothioate linkage
  modified_base 17..18: mod_base = OTHER; note = phosphorothioate linkage
  modified_base 18..19: mod_base = OTHER; note = phosphorothioate linkage
  modified_base 19..20: mod_base = OTHER; note = phosphorothioate linkage
  modified_base 1: mod_base = um
  modified_base 2: mod_base = gm
  modified_base 3: mod_base = cm
  modified_base 18: mod_base = um
  modified_base 19: mod_base = um
  modified_base 20: mod_base = um
tgcaggcaaggcggcggggg

SEQ ID NO: 1466 - RNA, 20 nt, Synthetic construct
  source 1..20: mol_type = other RNA
ggcaaggcggcgggggagga

SEQ ID NO: 1467 - RNA, 20 nt, Synthetic construct
  source 1..20: mol_type = other RNA
gcaaggcggcgggggaggac

SEQ ID NO: 1468 - RNA, 20 nt, Synthetic construct
  source 1..20: mol_type = other RNA
gtggggagcacggtggagag

SEQ ID NO: 1469 - RNA, 20 nt, Synthetic construct
  source 1..20: mol_type = other RNA
tggggagcacggtggagagc

SEQ ID NO: 1470 - RNA, 20 nt, Synthetic construct
  source 1..20: mol_type = other RNA
ggggagcacggtggagagcg

SEQ ID NO: 1471 - RNA, 20 nt, Synthetic construct
  source 1..20: mol_type = other RNA
  modified_base 1..2: mod_base = OTHER; note = phosphorothioate linkage
  modified_base 2..3: mod_base = OTHER; note = phosphorothioate linkage
  modified_base 3..4: mod_base = OTHER; note = phosphorothioate linkage
  modified_base 17..18: mod_base = OTHER; note = phosphorothioate linkage
  modified_base 18..19: mod_base = OTHER; note = phosphorothioate linkage
  modified_base 19..20: mod_base = OTHER; note = phosphorothioate linkage
  modified_base 1: mod_base = OTHER; note = 2prime-O-methyladenosine
  modified_base 2: mod_base = gm
  modified_base 3: mod_base = cm
  modified_base 18: mod_base = um
  modified_base 19: mod_base = um
  modified_base 20: mod_base = um
agcacggtggagagcgggga

SEQ ID NO: 1472 - RNA, 20 nt, Synthetic construct
  source 1..20: mol_type = other RNA
cggtggagagcggggacggc

SEQ ID NO: 1473 - RNA, 20 nt, Synthetic construct
  source 1..20: mol_type = other RNA
  modified_base 1..2: mod_base = OTHER; note = phosphorothioate linkage
  modified_base 2..3: mod_base = OTHER; note = phosphorothioate linkage
  modified_base 3..4: mod_base = OTHER; note = phosphorothioate linkage
  modified_base 17..18: mod_base = OTHER; note = phosphorothioate linkage
  modified_base 18..19: mod_base = OTHER; note = phosphorothioate linkage
  modified_base 19..20: mod_base = OTHER; note = phosphorothioate linkage
  modified_base 1: mod_base = cm
  modified_base 2: mod_base = gm
  modified_base 3: mod_base = um
  modified_base 18: mod_base = um
  modified_base 19: mod_base = um
  modified_base 20: mod_base = um
cgtgcggctgcgctattcag

SEQ ID NO: 1474 - RNA, 20 nt, Synthetic construct
  source 1..20: mol_type = other RNA
gtgcggctgcgctattcagt

SEQ ID NO: 1475 - RNA, 20 nt, Synthetic construct
  source 1..20: mol_type = other RNA
ggctgcgctattcagtggga

SEQ ID NO: 1476 - RNA, 20 nt, Synthetic construct
  source 1..20: mol_type = other RNA
ctattcagtgggaaggttcg

SEQ ID NO: 1477 - RNA, 20 nt, Synthetic construct
  source 1..20: mol_type = other RNA
tattcagtgggaaggttcgc

SEQ ID NO: 1478 - RNA, 20 nt, Synthetic construct
  source 1..20: mol_type = other RNA
attcagtgggaaggttcgcg

SEQ ID NO: 1479 - RNA, 20 nt, Synthetic construct
  source 1..20: mol_type = other RNA
agtgggaaggttcgcggggt

SEQ ID NO: 1480 - RNA, 20 nt, Synthetic construct
  source 1..20: mol_type = other RNA
gtgggaaggttcgcggggtt

SEQ ID NO: 1481 - RNA, 20 nt, Synthetic construct
  source 1..20: mol_type = other RNA
agggcgagcagagcactgcc

SEQ ID NO: 1482 - RNA, 20 nt, Synthetic construct
  source 1..20: mol_type = other RNA
tttctgcctcgccgcggcac

SEQ ID NO: 1483 - RNA, 20 nt, Synthetic construct
  source 1..20: mol_type = other RNA
ctgcctcgccgcggcacagg

SEQ ID NO: 1484 - RNA, 20 nt, Synthetic construct
  source 1..20: mol_type = other RNA
tgcctcgccgcggcacaggt

SEQ ID NO: 1485 - RNA, 20 nt, Synthetic construct
  source 1..20: mol_type = other RNA
cacccacctgtgccgcggcg

SEQ ID NO: 1486 - RNA, 20 nt, Synthetic construct
  source 1..20: mol_type = other RNA
tccttcacccacctgtgccg

SEQ ID NO: 1487 - RNA, 20 nt, Synthetic construct
  source 1..20: mol_type = other RNA
tgggtgaaggagtgaatgcc

SEQ ID NO: 1488 - DNA, 2001 bp, Synthetic construct
  source 1..2001: mol_type = other DNA
tacctcatggagtcactgtcaacccactggttgcactgtctttgtgcactggctctctggagtgaggtctttgcaaacaaagtggaaagagcatcaactttggactccagcacctagattcagagcaggccatttcactcggaatctgctgtgcatctgcaagggaggatcataaattcgcctttgtttcttcccagtatcgacagcccttccagaaagagcaagcctcatgtcatgccacatgtacaatctgaggccaggagctctctttccccttttcatcctcctgcctggtacacaataggtgtttactggatgcttgtccagttgatttcttgaacatggtgtgtaaaaggaatctttgcaaattgaatcttctggaaagctgagcttgtgcctaccatagaattctgaatgtacctatatgacgtctttgcaaacttaaaacctgaatctttgtagtataaatcccttgaaatgcatgtaggctggacatcaaaagcaagcaatctcttcaaggagcagctagttggtaaggtcagtgtgcagggtgcataaagggcagaggccggagggggtccaggctaagtttagaaggctgccaggttaaggccagtggaaagaattcggtgggcagcgaggagtccacagtaggattgattcagaagtctcactggtcagcaggagacaaggtggacccaggaaacactgaaaaggtgggcccggcagaacttggagtctggcatcccacgcagggtgagaggcgggagaggaggagcccctagggcgccggcctgccttccagcccagttaggatttgggagttttttcttccctctgcgcgtaatctgacgctgtttggggagggcgaggccgaaacctgatcctccagtccgggggttccgttaatgtttaatcagataggatcgtccgatggggctctggtggcgtgatctgcgcgccccaggcgtcaagcacccacaccctagaaggtttccgcagcgacgtcgaggcgctcatggttgcaggcgggcgccgccgttcagttcagggtctgagcctggaggagtgagccaggcagtgagactggctcgggcgggccgggacgcgtcgttgcagcagcggctcccagctcccagccaggattccgcgcgccccttcacgcgccctgctcctgaacttcagctcctgcacagtcctccccaccgcaaggctcaaggcgccgccggcgtggaccgcgcacggcctctaggtctcctcgccaggacagcaacctctcccctggccctcatgggcaccgtcagctccaggcggtcctggtggccgctgccactgctgctgctgctgctgctgctcctgggtcccgcgggcgcccgtgcgcaggaggacgaggacggcgactacgaggagctggtgctagccttgcgttccgaggaggacggcctggccgaagcacccgagcacggaaccacagccaccttccaccgctgcgccaaggtgcgggtgtagggatgggaggccggggcgaacccgcagccgggacggtgcggtgctgtttcctctcgggcctcagtttccccccatgtaagagaggaagtggagtgcaggtcgccgagggctcttcgcttggcacgatcttggggactgcaggcaaggcggcgggggaggacgggtagtggggagcacggtggagagcggggacggccggctctttggggacttgctggggcgtgcggctgcgctattcagtgggaaggttcgcggggttgggagacccggaggccgaggaagggcgagcagagcactgccaggatatcctgcccagatttcccagtttctgcctcgccgcggcacaggtgggtgaaggagtgaatgcctggaacgtactgggaactgcaccaggcacagagaaagcgggcttgccattatagtgggttccgatttggtttggaaaacatgggcagcggagggtggagggcctggagagaaggccctacccga

SEQ ID NO: 1489 - DNA, 1069 bp, Synthetic construct
  source 1..1069: mol_type = other DNA
gcaggagacaaggtggacccaggaaacactgaaaaggtgggcccggcagaacttggagtctggcatcccacgcagggtgagaggcgggagaggaggagcccctagggcgccggcctgccttccagcccagttaggatttgggagttttttcttccctctgcgcgtaatctgacgctgtttggggagggcgaggccgaaacctgatcctccagtccgggggttccgttaatgtttaatcagataggatcgtccgatggggctctggtggcgtgatctgcgcgccccaggcgtcaagcacccacaccctagaaggtttccgcagcgacgtcgaggcgctcatggttgcaggcgggcgccgccgttcagttcagggtctgagcctggaggagtgagccaggcagtgagactggctcgggcgggccgggacgcgtcgttgcagcagcggctcccagctcccagccaggattccgcgcgccccttcacgcgccctgctcctgaacttcagctcctgcacagtcctccccaccgcaaggctcaaggcgccgccggcgtggaccgcgcacggcctctaggtctcctcgccaggacagcaacctctcccctggccctcatgggcaccgtcagctccaggcggtcctggtggccgctgccactgctgctgctgctgctgctgctcctgggtcccgcgggcgcccgtgcgcaggaggacgaggacggcgactacgaggagctggtgctagccttgcgttccgaggaggacggcctggccgaagcacccgagcacggaaccacagccaccttccaccgctgcgccaaggtgcgggtgtagggatgggaggccggggcgaacccgcagccgggacggtgcggtgctgtttcctctcgggcctcagtttccccccatgtaagagaggaagtggagtgcaggtcgccgagggctcttcgcttggcacgatcttggggactgcaggcaaggcggcgggggaggacgggtagtggggagcacggtggagagcggggacggccggctctttggggacttgctggggcgtgcggctgcgctattcag

SEQ ID NO: 1490 - RNA, 20 nt, Synthetic construct
  source 1..20: mol_type = other RNA
cccgcaccttggcgcagcgg

SEQ ID NO: 1491-1494 - skipped (4 entries)

SEQ ID NO: 1495 - protein, 2086 aa, Synthetic construct
MNHDQEFDPPKVYPPVPAEKRKPIRVLSLFDGIATGLLVLKDLGIQVDRYIASEVCEDSITVGMVRHQGKIMYVGDVRSVTQKHIQEWGPFDLVIGGSPCNDLSIVNPARKGLYEGTGRLFFEFYRLLHDARPKEGDDRPFFWLFENVVAMGVSDKRDISRFLESNPVMIDAKEVSAAHRARYFWGNLPGMNRPLASTVNDKLELQECLEHGRIAKFSKVRTITTRSNSIKQGKDQHFPVFMNEKEDILWCTEMERVFGFPVHYTDVSNMSRLARQRLLGRSWSVPVIRHLFAPLKEYFACVSSGNSNANSRGPSFSSGLVPLSLRGSHMNPLEMFETVPVWRRQPVRVLSLFEDIKKELTSLGFLESGSDPGQLKHVVDVTDTVRKDVEEWGPFDLVYGATPPLGHTCDRPPSWYLFQFHRLLQYARPKPGSPRPFFWMFVDNLVLNKEDLDVASRFLEMEPVTIPDVHGGSLQNAVRVWSNIPAIRSRHWALVSEEELSLLAQNKQSSKLAAKWPTKLVKNCFLPLREYFKYFSTELTSSLGGPSSGAPPPSGGSPAGSPTSTEEGTSESATPESGPGTSTEPSEGSAPGSPAGSPTSTEEGTSTEPSEGSAPGTSTEPSEPKKKRKVYMDKKYSIGLAIGTNSVGWAVITDEYKVPSKKFKVLGNTDRHSIKKNLIGALLFDSGETAEATRLKRTARRRYTRRKNRICYLQEIFSNEMAKVDDSFFHRLEESFLVEEDKKHERHPIFGNIVDEVAYHEKYPTIYHLRKKLVDSTDKADLRLIYLALAHMIKFRGHFLIEGDLNPDNSDVDKLFIQLVQTYNQLFEENPINASGVDAKAILSARLSKSRRLENLIAQLPGEKKNGLFGNLIALSLGLTPNFKSNFDLAEDAKLQLSKDTYDDDLDNLLAQIGDQYADLFLAAKNLSDAILLSDILRVNTEITKAPLSASMIKRYDEHHQDLTLLKALVRQQLPEKYKEIFFDQSKNGYAGYIDGGASQEEFYKFIKPILEKMDGTEELLVKLNREDLLRKQRTFDNGSIPHQIHLGELHAILRRQEDFYPFLKDNREKIEKILTFRIPYYVGPLARGNSRFAWMTRKSEETITPWNFEEVVDKGASAQSFIERMTNFDKNLPNEKVLPKHSLLYEYFTVYNELTKVKYVTEGMRKPAFLSGEQKKAIVDLLFKTNRKVTVKQLKEDYFKKIECFDSVEISGVEDRFNASLGTYHDLLKIIKDKDFLDNEENEDILEDIVLTLTLFEDREMIEERLKTYAHLFDDKVMKQLKRRRYTGWGRLSRKLINGIRDKQSGKTILDFLKSDGFANRNFMQLIHDDSLTFKEDIQKAQVSGQGDSLHEHIANLAGSPAIKKGILQTVKVVDELVKVMGRHKPENIVIEMARENQTTQKGQKNSRERMKRIEEGIKELGSQILKEHPVENTQLQNEKLYLYYLQNGRDMYVDQELDINRLSDYDVDAIVPQSFLKDDSIDNKVLTRSDKNRGKSDNVPSEEVVKKMKNYWRQLLNAKLITQRKFDNLTKAERGGLSELDKAGFIKRQLVETRQITKHVAQILDSRMNTKYDENDKLIREVKVITLKSKLVSDFRKDFQFYKVREINNYHHAHDAYLNAVVGTALIKKYPKLESEFVYGDYKVYDVRKMIAKSEQEIGKATAKYFFYSNIMNFFKTEITLANGEIRKRPLIETNGETGEIVWDKGRDFATVRKVLSMPQVNIVKKTEVQTGGFSKESILPKRNSDKLIARKKDWDPKKYGGFDSPTVAYSVLVVAKVEKGKSKKLKSVKELLGITIMERSSFEKNPIDFLEAKGYKEVKKDLIIKLPKYSLFELENGRKRMLASAGELQKGNELALPSKYVNFLYLASHYEKLKGSPEDNEQKQLFVEQHKHYLDEIIEQISEFSKRVILADANLDKVLSAYNKHRDKPIREQAENIIHLFTLTNLGAPAAFKYFDTTIDRKRYTSTKEVLDATLIHQSITGLYETRIDLSQLGGDPKKKRKVSGSETPGTSESATPESTGRTLVTFKDVFVDFTREEWKLLDTAQQIVYRNVMLENYKNLVSLGYQLTKPDVILRLEKGEEP

SEQ ID NO: 1496 - protein, 896 aa, Synthetic construct
MNHDQEFDPPKVYPPVPAEKRKPIRVLSLFDGIATGLLVLKDLGIQVDRYIASEVCEDSITVGMVRHQGKIMYVGDVRSVTQKHIQEWGPFDLVIGGSPCNDLSIVNPARKGLYEGTGRLFFEFYRLLHDARPKEGDDRPFFWLFENVVAMGVSDKRDISRFLESNPVMIDAKEVSAAHRARYFWGNLPGMNRPLASTVNDKLELQECLEHGRIAKFSKVRTITTRSNSIKQGKDQHFPVFMNEKEDILWCTEMERVFGFPVHYTDVSNMSRLARQRLLGRSWSVPVIRHLFAPLKEYFACVSSGNSNANSRGPSFSSGLVPLSLRGSHMNPLEMFETVPVWRRQPVRVLSLFEDIKKELTSLGFLESGSDPGQLKHVVDVTDTVRKDVEEWGPFDLVYGATPPLGHTCDRPPSWYLFQFHRLLQYARPKPGSPRPFFWMFVDNLVLNKEDLDVASRFLEMEPVTIPDVHGGSLQNAVRVWSNIPAIRSRHWALVSEEELSLLAQNKQSSKLAAKWPTKLVKNCFLPLREYFKYFSTELTSSLGGPSSGAPPPSGGSPAGSPTSTEEGTSESATPESGPGTSTEPSEGSAPGSPAGSPTSTEEGTSTEPSEGSAPGTSTEPSEPKKKRKVYSRPGERPFQCRICMRNFSXXXXXXXHXXTHTGEKPFQCRICMRNFSXXXXXXXHXXTHLINKERPFQCRICMRNFSXXXXXXXHXXTHTGEKPFQCRICMRNFSXXXXXXXHXXTHLINKERPFQCRICMRNFSXXXXXXXHXXTHTGEKPFQCRICMRNFSXXXXXXXHXXTHLRGSPKKKRKVSGSETPGTSESATPESTGRTLVTFKDVFVDFTREEWKLLDTAQQIVYRNVMLENYKNLVSLGYQLTKPDVILRLEKGEEP

SEQ ID NO: 1497 - protein, 386 aa, Synthetic construct
MAAIPALDPEAEPSMDVILVGSSELSSSVSPGTGRDLIAYEVKANQRNIEDICICCGSLQVHTQHPLFEGGICAPCKDKFLDALFLYDDDGYQSYCSICCSGETLLICGNPDCTRCYCFECVDSLVGPGTSGKVHAMSNWVCYLCLPSSRSGLLQRRRKWRSQLKAFYDRESENPLEMFETVPVWRRQPVRVLSLFEDIKKELTSLGFLESGSDPGQLKHVVDVTDTVRKDVEEWGPFDLVYGATPPLGHTCDRPPSWYLFQFHRLLQYARPKPGSPRPFFWMFVDNLVLNKEDLDVASRFLEMEPVTIPDVHGGSLQNAVRVWSNIPAIRSRHWALVSEEELSLLAQNKQSSKLAAKWPTKLVKNCFLPLREYFKYFSTELTSSL

SEQ ID NO: 1498 - protein, 2098 aa, Synthetic construct
MPKKKRKVPKKKRKVNHDQEFDPPKVYPPVPAEKRKPIRVLSLFDGIATGLLVLKDLGIQVDRYIASEVCEDSITVGMVRHQGKIMYVGDVRSVTQKHIQEWGPFDLVIGGSPCNDLSIVNPARKGLYEGTGRLFFEFYRLLHDARPKEGDDRPFFWLFENVVAMGVSDKRDISRFLESNPVMIDAKEVSAAHRARYFWGNLPGMNRPLASTVNDKLELQECLEHGRIAKFSKVRTITTRSNSIKQGKDQHFPVFMNEKEDILWCTEMERVFGFPVHYTDVSNMSRLARQRLLGRSWSVPVIRHLFAPLKEYFACVSSGNSNANSRGPSFSSGLVPLSLRGSHNPLEMFETVPVWRRQPVRVLSLFEDIKKELTSLGFLESGSDPGQLKHVVDVTDTVRKDVEEWGPFDLVYGATPPLGHTCDRPPSWYLFQFHRLLQYARPKPGSPRPFFWMFVDNLVLNKEDLDVASRFLEMEPVTIPDVHGGSLQNAVRVWSNIPAIRSRHWALVSEEELSLLAQNKQSSKLAAKWPTKLVKNCFLPLREYFKYFSTELTSSLGGPSSGAPPPSGGSPAGSPTSTEEGTSESATPESGPGTSTEPSEGSAPGSPAGSPTSTEEGTSTEPSEGSAPGTSTEPSEMDKKYSIGLAIGTNSVGWAVITDEYKVPSKKFKVLGNTDRHSIKKNLIGALLFDSGETAEATRLKRTARRRYTRRKNRICYLQEIFSNEMAKVDDSFFHRLEESFLVEEDKKHERHPIFGNIVDEVAYHEKYPTIYHLRKKLVDSTDKADLRLIYLALAHMIKFRGHFLIEGDLNPDNSDVDKLFIQLVQTYNQLFEENPINASGVDAKAILSARLSKSRRLENLIAQLPGEKKNGLFGNLIALSLGLTPNFKSNFDLAEDAKLQLSKDTYDDDLDNLLAQIGDQYADLFLAAKNLSDAILLSDILRVNTEITKAPLSASMIKRYDEHHQDLTLLKALVRQQLPEKYKEIFFDQSKNGYAGYIDGGASQEEFYKFIKPILEKMDGTEELLVKLNREDLLRKQRTFDNGSIPHQIHLGELHAILRRQEDFYPFLKDNREKIEKILTFRIPYYVGPLARGNSRFAWMTRKSEETITPWNFEEVVDKGASAQSFIERMTNFDKNLPNEKVLPKHSLLYEYFTVYNELTKVKYVTEGMRKPAFLSGEQKKAIVDLLFKTNRKVTVKQLKEDYFKKIECFDSVEISGVEDRFNASLGTYHDLLKIIKDKDFLDNEENEDILEDIVLTLTLFEDREMIEERLKTYAHLFDDKVMKQLKRRRYTGWGRLSRKLINGIRDKQSGKTILDFLKSDGFANRNFMQLIHDDSLTFKEDIQKAQVSGQGDSLHEHIANLAGSPAIKKGILQTVKVVDELVKVMGRHKPENIVIEMARENQTTQKGQKNSRERMKRIEEGIKELGSQILKEHPVENTQLQNEKLYLYYLQNGRDMYVDQELDINRLSDYDVDAIVPQSFLKDDSIDNKVLTRSDKNRGKSDNVPSEEVVKKMKNYWRQLLNAKLITQRKFDNLTKAERGGLSELDKAGFIKRQLVETRQITKHVAQILDSRMNTKYDENDKLIREVKVITLKSKLVSDFRKDFQFYKVREINNYHHAHDAYLNAVVGTALIKKYPKLESEFVYGDYKVYDVRKMIAKSEQEIGKATAKYFFYSNIMNFFKTEITLANGEIRKRPLIETNGETGEIVWDKGRDFATVRKVLSMPQVNIVKKTEVQTGGFSKESILPKRNSDKLIARKKDWDPKKYGGFDSPTVAYSVLVVAKVEKGKSKKLKSVKELLGITIMERSSFEKNPIDFLEAKGYKEVKKDLIIKLPKYSLFELENGRKRMLASAGELQKGNELALPSKYVNFLYLASHYEKLKGSPEDNEQKQLFVEQHKHYLDEIIEQISEFSKRVILADANLDKVLSAYNKHRDKPIREQAENIIHLFTLTNLGAPAAFKYFDTTIDRKRYTSTKEVLDATLIHQSITGLYETRIDLSQLGGDSGSETPGTSESATPESTGRTLVTFKDVFVDFTREEWKLLDTAQQIVYRNVMLENYKNLVSLGYQLTKPDVILRLEKGEEPPKKKRKVPKKKRKV

SEQ ID NO: 1499 - DNA, 6294 bp, Synthetic construct
  source 1..6294: mol_type = other DNA
atgccaaaaaagaagagaaaggtaccgaagaaaaaaagaaaggtcaaccatgatcaagaattcgacccacctaaagtctacccacctgtgcccgccgaaaaaaggaaacccataagggtgctgtcactctttgatggcatcgccactggtctcctggttcttaaggatctgggaattcaggtcgatcggtacattgctagcgaggtttgtgaggatagtattacagtgggtatggtgcgccaccagggaaagatcatgtatgttggtgacgttaggagcgtcacccagaaacatatccaggagtggggaccctttgatttggtgatcggaggtagtccctgcaatgacctttccatcgtgaatccagccaggaaagggctgtatgaagggactggtaggctctttttcgagttttatcgcctgcttcacgacgctagacctaaggaaggtgacgataggcctttcttttggctttttgagaacgtcgtggcaatgggagtctccgacaaaagggacatttctcgctttctggaatctaaccccgttatgatcgatgccaaggaagtttctgccgctcacagggcaaggtacttctggggcaatctgcccggaatgaatcgcccactggccagtaccgtgaatgacaaactggagctgcaggagtgcctggagcacggaagaatcgcaaagttttctaaagtcaggaccattaccactcgcagtaactccataaaacagggtaaggaccagcattttcccgtcttcatgaatgaaaaggaagatattctgtggtgcactgaaatggagagagttttcgggtttcccgtgcactataccgatgtttccaacatgtcccgccttgcaagacaaaggcttttgggccgctcttggtctgtgccagtgatccggcacttgtttgctcccctcaaagagtacttcgcttgcgtcagttccggaaattcaaacgctaactctcggggtccatctttctccagtggtctcgtgccactgtctctccggggctctcacaatcccctggagatgtttgagacagtgccagtctggcggaggcagcccgttcgcgttctctctctgttcgaagatattaaaaaggaactcacctcccttgggttcctggagagcgggagcgaccccggacagcttaagcacgtggtcgacgtgactgacaccgtccgcaaagacgtggaggaatggggccccttcgatctggtctatggggcaacccctccccttgggcatacatgtgatcggcctccatcctggtacctgttccagtttcacagactcctgcagtatgccaggccaaagccagggagcccaaggccctttttctggatgttcgtcgacaacctggtcctgaacaaagaagatctcgacgttgctagtcgctttctcgaaatggagcccgtgaccattcccgacgtgcatggcggttccctccagaatgcagtcagggtttggagcaatatccctgccatcaggtcaaggcactgggcactggtttcagaggaagagctgtccctccttgcccagaacaagcagtcatccaaactggcagccaagtggccaactaagctggtcaagaactgctttcttcccctcagagaatattttaagtatttcagtactgaactgactagcagtctgggagggccgagctctggcgcacccccaccaagtggagggtctcctgccgggtccccaacatctactgaagaaggcaccagcgaatccgcaacgcccgagtcaggccctggtacctccacagaaccatctgaaggtagtgcgcctggttccccagctggaagccctacttccaccgaagaaggcacgtcaaccgaaccaagtgaaggatctgcccctgggaccagcactgaaccatctgagatggacaagaagtacagcatcggcctggccatcggcaccaactctgtgggctgggccgtgatcaccgacgagtacaaggtgcccagcaagaaattcaaggtgctgggcaacaccgaccggcacagcatcaagaagaacctgatcggcgccctgctgttcgacagcggagaaacagccgaggccacccggctgaagagaaccgccagaagaagatacaccagacggaagaaccggatctgctatctgcaagagatcttcagcaacgagatggccaaggtggacgacagcttcttccacagactggaagagtccttcctggtggaagaggataagaagcacgagcggcaccccatcttcggcaacatcgtggacgaggtggcctaccacgagaagtaccccaccatctaccacctgagaaagaaactggtggacagcaccgacaaggccgacctgcggctgatctatctggccctggcccacatgatcaagttccggggccacttcctgatcgagggcgacctgaaccccgacaacagcgacgtggacaagctgttcatccagctggtgcagacctacaaccagctgttcgaggaaaaccccatcaacgccagcggcgtggacgccaaggccatcctgtctgccagactgagcaagagcagacggctggaaaatctgatcgcccagctgcccggcgagaagaagaatggcctgttcggcaacctgattgccctgagcctgggcctgacccccaacttcaagagcaacttcgacctggccgaggatgccaaactgcagctgagcaaggacacctacgacgacgacctggacaacctgctggcccagatcggcgaccagtacgccgacctgtttctggccgccaagaacctgtccgacgccatcctgctgagcgacatcctgagagtgaacaccgagatcaccaaggcccccctgagcgcctctatgatcaagagatacgacgagcaccaccaggacctgaccctgctgaaagctctcgtgcggcagcagctgcctgagaagtacaaagagattttcttcgaccagagcaagaacggctacgccggctacatcgatggcggagccagccaggaagagttctacaagttcatcaagcccatcctggaaaagatggacggcaccgaggaactgctcgtgaagctgaacagagaggacctgctgcggaagcagcggaccttcgacaacggcagcatcccccaccagatccacctgggagagctgcacgccattctgcggcggcaggaagatttttacccattcctgaaggacaaccgggaaaagatcgagaagatcctgaccttccgcatcccctactacgtgggccctctggccaggggaaacagcagattcgcctggatgaccagaaagagcgaggaaaccatcaccccctggaacttcgaggaagtggtggacaagggcgccagcgcccagagcttcatcgagcggatgaccaacttcgataagaacctgcccaacgagaaggtgctgcccaagcacagcctgctgtacgagtacttcaccgtgtacaacgagctgaccaaagtgaaatacgtgaccgagggaatgagaaagcccgccttcctgagcggcgagcagaaaaaagccatcgtggacctgctgttcaagaccaaccggaaagtgaccgtgaagcagctgaaagaggactacttcaagaaaatcgagtgcttcgactccgtggaaatctccggcgtggaagatcggttcaacgcctccctgggcacataccacgatctgctgaaaattatcaaggacaaggacttcctggacaatgaggaaaacgaggacattctggaagatatcgtgctgaccctgacactgtttgaggacagagagatgatcgaggaacggctgaaaacctatgcccacctgttcgacgacaaagtgatgaagcagctgaagcggcggagatacaccggctggggcaggctgagccggaagctgatcaacggcatccgggacaagcagtccggcaagacaatcctggatttcctgaagtccgacggcttcgccaacagaaacttcatgcagctgatccacgacgacagcctgacctttaaagaggacatccagaaagcccaggtgtccggccagggcgatagcctgcacgagcacattgccaatctggccggcagccccgccattaagaagggcatcctgcagacagtgaaggtggtggacgagctcgtgaaagtgatgggccggcacaagcccgagaacatcgtgatcgaaatggccagagagaaccagaccacccagaagggacagaagaacagccgcgagagaatgaagcggatcgaagagggcatcaaagagctgggcagccagatcctgaaagaacaccccgtggaaaacacccagctgcagaacgagaagctgtacctgtactacctgcagaatgggcgggatatgtacgtggaccaggaactggacatcaaccggctgtccgactacgatgtggacgctatcgtgcctcagagctttctgaaggacgactccatcgataacaaagtgctgactcggagcgacaagaaccggggcaagagcgacaacgtgccctccgaagaggtcgtgaagaagatgaagaactactggcgccagctgctgaatgccaagctgattacccagaggaagttcgacaatctgaccaaggccgagagaggcggcctgagcgaactggataaggccggcttcatcaagagacagctggtggaaacccggcagatcacaaagcacgtggcacagatcctggactcccggatgaacactaagtacgacgagaacgacaaactgatccgggaagtgaaagtgatcaccctgaagtccaagctggtgtccgatttccggaaggatttccagttttacaaagtgcgcgagatcaacaactaccaccacgcccacgacgcctacctgaacgccgtcgtgggaaccgccctgatcaaaaagtaccctaagctggaaagcgagttcgtgtacggcgactacaaggtgtacgacgtgcggaagatgatcgccaagagcgagcaggaaatcggcaaggctaccgccaagtacttcttctacagcaacatcatgaactttttcaagaccgagattaccctggccaacggcgagatccggaagcggcctctgatcgagacaaacggcgaaacaggcgagatcgtgtgggataagggccgggactttgccaccgtgcggaaagtgctgtctatgccccaagtgaatatcgtgaaaaagaccgaggtgcagacaggcggcttcagcaaagagtctatcctgcccaagaggaacagcgacaagctgatcgccagaaagaaggactgggaccctaagaagtacggcggcttcgacagccccaccgtggcctattctgtgctggtggtggccaaagtggaaaagggcaagtccaagaaactgaagagtgtgaaagagctgctggggatcaccatcatggaaagaagcagcttcgagaagaatcccatcgactttctggaagccaagggctacaaagaagtgaaaaaggacctgatcatcaagctgcctaagtactccctgttcgagctggaaaacggccggaagagaatgctggcctctgccggcgaactgcagaagggaaacgaactggccctgccctccaaatatgtgaacttcctgtacctggccagccactatgagaagctgaagggctcccccgaggataatgagcagaaacagctgtttgtggaacagcacaaacactacctggacgagatcatcgagcagatcagcgagttctccaagagagtgatcctggccgacgctaatctggacaaggtgctgagcgcctacaacaagcacagagacaagcctatcagagagcaggccgagaatatcatccacctgtttaccctgaccaatctgggagcccctgccgccttcaagtactttgacaccaccatcgaccggaagaggtacaccagcaccaaagaggtgctggacgccaccctgatccaccagagcatcaccggcctgtacgagacacggatcgacctgtctcagctgggaggcgacagcggaagtgagaccccaggtacatccgaatcagcaacgcctgaaagcaccggtcggacactggtgaccttcaaggatgtatttgtggacttcaccagggaggagtggaagctgctggacactgctcagcagatcgtgtacagaaatgtgatgctggagaactataagaacctggtttccttgggttatcagcttactaagccagatgtgatcctccggttggagaagggagaagagcccccaaaaaagaagagaaaggtaccgaagaaaaaaagaaaggtc

SEQ ID NO: 1500 - protein, 2084 aa, Synthetic construct
MNHDQEFDPPKVYPPVPAEKRKPIRVLSLFDGIATGLLVLKDLGIQVDRYIASEVCEDSITVGMVRHQGKIMYVGDVRSVTQKHIQEWGPFDLVIGGSPCNDLSIVNPARKGLYEGTGRLFFEFYRLLHDARPKEGDDRPFFWLFENVVAMGVSDKRDISRFLESNPVMIDAKEVSAAHRARYFWGNLPGMNRPLASTVNDKLELQECLEHGRIAKFSKVRTITTRSNSIKQGKDQHFPVFMNEKEDILWCTEMERVFGFPVHYTDVSNMSRLARQRLLGRSWSVPVIRHLFAPLKEYFACVSSGNSNANSRGPSFSSGLVPLSLRGSHNPLEMFETVPVWRRQPVRVLSLFEDIKKELTSLGFLESGSDPGQLKHVVDVTDTVRKDVEEWGPFDLVYGATPPLGHTCDRPPSWYLFQFHRLLQYARPKPGSPRPFFWMFVDNLVLNKEDLDVASRFLEMEPVTIPDVHGGSLQNAVRVWSNIPAIRSRHWALVSEEELSLLAQNKQSSKLAAKWPTKLVKNCFLPLREYFKYFSTELTSSLGGPSSGAPPPSGGSPAGSPTSTEEGTSESATPESGPGTSTEPSEGSAPGSPAGSPTSTEEGTSTEPSEGSAPGTSTEPSEPKKKRKVMDKKYSIGLAIGTNSVGWAVITDEYKVPSKKFKVLGNTDRHSIKKNLIGALLFDSGETAEATRLKRTARRRYTRRKNRICYLQEIFSNEMAKVDDSFFHRLEESFLVEEDKKHERHPIFGNIVDEVAYHEKYPTIYHLRKKLVDSTDKADLRLIYLALAHMIKFRGHFLIEGDLNPDNSDVDKLFIQLVQTYNQLFEENPINASGVDAKAILSARLSKSRRLENLIAQLPGEKKNGLFGNLIALSLGLTPNFKSNFDLAEDAKLQLSKDTYDDDLDNLLAQIGDQYADLFLAAKNLSDAILLSDILRVNTEITKAPLSASMIKRYDEHHQDLTLLKALVRQQLPEKYKEIFFDQSKNGYAGYIDGGASQEEFYKFIKPILEKMDGTEELLVKLNREDLLRKQRTFDNGSIPHQIHLGELHAILRRQEDFYPFLKDNREKIEKILTFRIPYYVGPLARGNSRFAWMTRKSEETITPWNFEEVVDKGASAQSFIERMTNFDKNLPNEKVLPKHSLLYEYFTVYNELTKVKYVTEGMRKPAFLSGEQKKAIVDLLFKTNRKVTVKQLKEDYFKKIECFDSVEISGVEDRFNASLGTYHDLLKIIKDKDFLDNEENEDILEDIVLTLTLFEDREMIEERLKTYAHLFDDKVMKQLKRRRYTGWGRLSRKLINGIRDKQSGKTILDFLKSDGFANRNFMQLIHDDSLTFKEDIQKAQVSGQGDSLHEHIANLAGSPAIKKGILQTVKVVDELVKVMGRHKPENIVIEMARENQTTQKGQKNSRERMKRIEEGIKELGSQILKEHPVENTQLQNEKLYLYYLQNGRDMYVDQELDINRLSDYDVDAIVPQSFLKDDSIDNKVLTRSDKNRGKSDNVPSEEVVKKMKNYWRQLLNAKLITQRKFDNLTKAERGGLSELDKAGFIKRQLVETRQITKHVAQILDSRMNTKYDENDKLIREVKVITLKSKLVSDFRKDFQFYKVREINNYHHAHDAYLNAVVGTALIKKYPKLESEFVYGDYKVYDVRKMIAKSEQEIGKATAKYFFYSNIMNFFKTEITLANGEIRKRPLIETNGETGEIVWDKGRDFATVRKVLSMPQVNIVKKTEVQTGGFSKESILPKRNSDKLIARKKDWDPKKYGGFDSPTVAYSVLVVAKVEKGKSKKLKSVKELLGITIMERSSFEKNPIDFLEAKGYKEVKKDLIIKLPKYSLFELENGRKRMLASAGELQKGNELALPSKYVNFLYLASHYEKLKGSPEDNEQKQLFVEQHKHYLDEIIEQISEFSKRVILADANLDKVLSAYNKHRDKPIREQAENIIHLFTLTNLGAPAAFKYFDTTIDRKRYTSTKEVLDATLIHQSITGLYETRIDLSQLGGDPKKKRKVSGSETPGTSESATPESTGRTLVTFKDVFVDFTREEWKLLDTAQQIVYRNVMLENYKNLVSLGYQLTKPDVILRLEKGEEP

SEQ ID NO: 1501 - DNA, 6252 bp, Synthetic construct
  source 1..6252: mol_type = other DNA
atgaaccacgaccaggaatttgaccctccaaaggtttacccacctgtcccagctgagaagaggaagcccatccgggtgctgtctctctttgatggaatcgctacagggctcctggtgctgaaggacttgggcattcaggtggaccgctacattgcctcggaggtgtgtgaggactccatcacggtgggcatggtgcggcaccaggggaagatcatgtacgtcggggacgtccgcagcgtcacacagaagcatatccaggagtggggcccattcgatctggtgattgggggcagtccctgcaatgacctctccatcgtcaaccctgctcgcaagggcctctacgagggcactggccggctcttctttgagttctaccgcctcctgcatgatgcgcggcccaaggagggagatgatcgccccttcttctggctctttgagaatgtggtggccatgggcgttagtgacaagagggacatctcgcgatttctcgagtccaaccctgtgatgattgatgccaaagaagtgtcagctgcacacagggcccgctacttctggggtaaccttcccggtatgaacaggccgttggcatccactgtgaatgataagctggagctgcaggagtgtctggagcatggcaggatagccaagttcagcaaagtgaggaccattactacgaggtcaaactccataaagcagggcaaagaccagcattttcctgtcttcatgaatgagaaagaggacatcttatggtgcactgaaatggaaagggtatttggtttcccagtccactatactgacgtctccaacatgagccgcttggcgaggcagagactgctgggccggtcatggagcgtgccagtcatccgccacctcttcgctccgctgaaggagtattttgcgtgtgtgtctagcggcaatagtaacgctaacagccgcgggccgagcttcagcagcggcctggtgccgttaagcttgcgcggcagccataatccccttgagatgttcgaaaccgtgcctgtgtggaggagacagccagtccgggtgctgtccctttttgaagacatcaagaaagagctgacgagtttgggctttttggaaagtggttctgacccgggacaactgaagcatgtggttgatgtcacagacacagtgaggaaggatgtggaggagtggggacccttcgatcttgtgtacggcgccacacctcccctgggccacacctgtgaccgtcctcccagctggtacctgttccagttccaccggctcctgcagtacgcacggcccaagccaggcagccccaggcccttcttctggatgttcgtggacaatctggtgctgaacaaggaagacctggacgtcgcatctcgcttcctggagatggagccagtcaccatcccagatgtccacggcggatccttgcagaatgctgtccgcgtgtggagcaacatcccagccataaggagcaggcactgggctctggtttcggaagaagaattgtccctgctggcccagaacaagcagagctcgaagctcgcggccaagtggcccaccaagctggtgaagaactgctttctccccctaagagaatatttcaagtatttttcaacagaactcacttcctctttaggagggccgagctctggcgcacccccaccaagtggagggtctcctgccgggtccccaacatctactgaagaaggcaccagcgaatccgcaacgcccgagtcaggccctggtacctccacagaaccatctgaaggtagtgcgcctggttccccagctggaagccctacttccaccgaagaaggcacgtcaaccgaaccaagtgaaggatctgcccctgggaccagcactgaaccatctgagccaaaaaagaagagaaaggtaatggacaagaagtacagcatcggcctggccatcggcaccaactctgtgggctgggccgtgatcaccgacgagtacaaggtgcccagcaagaaattcaaggtgctgggcaacaccgaccggcacagcatcaagaagaacctgatcggcgccctgctgttcgacagcggagaaacagccgaggccacccggctgaagagaaccgccagaagaagatacaccagacggaagaaccggatctgctatctgcaagagatcttcagcaacgagatggccaaggtggacgacagcttcttccacagactggaagagtccttcctggtggaagaggataagaagcacgagcggcaccccatcttcggcaacatcgtggacgaggtggcctaccacgagaagtaccccaccatctaccacctgagaaagaaactggtggacagcaccgacaaggccgacctgcggctgatctatctggccctggcccacatgatcaagttccggggccacttcctgatcgagggcgacctgaaccccgacaacagcgacgtggacaagctgttcatccagctggtgcagacctacaaccagctgttcgaggaaaaccccatcaacgccagcggcgtggacgccaaggccatcctgtctgccagactgagcaagagcagacggctggaaaatctgatcgcccagctgcccggcgagaagaagaatggcctgttcggcaacctgattgccctgagcctgggcctgacccccaacttcaagagcaacttcgacctggccgaggatgccaaactgcagctgagcaaggacacctacgacgacgacctggacaacctgctggcccagatcggcgaccagtacgccgacctgtttctggccgccaagaacctgtccgacgccatcctgctgagcgacatcctgagagtgaacaccgagatcaccaaggcccccctgagcgcctctatgatcaagagatacgacgagcaccaccaggacctgaccctgctgaaagctctcgtgcggcagcagctgcctgagaagtacaaagagattttcttcgaccagagcaagaacggctacgccggctacatcgatggcggagccagccaggaagagttctacaagttcatcaagcccatcctggaaaagatggacggcaccgaggaactgctcgtgaagctgaacagagaggacctgctgcggaagcagcggaccttcgacaacggcagcatcccccaccagatccacctgggagagctgcacgccattctgcggcggcaggaagatttttacccattcctgaaggacaaccgggaaaagatcgagaagatcctgaccttccgcatcccctactacgtgggccctctggccaggggaaacagcagattcgcctggatgaccagaaagagcgaggaaaccatcaccccctggaacttcgaggaagtggtggacaagggcgccagcgcccagagcttcatcgagcggatgaccaacttcgataagaacctgcccaacgagaaggtgctgcccaagcacagcctgctgtacgagtacttcaccgtgtacaacgagctgaccaaagtgaaatacgtgaccgagggaatgagaaagcccgccttcctgagcggcgagcagaaaaaagccatcgtggacctgctgttcaagaccaaccggaaagtgaccgtgaagcagctgaaagaggactacttcaagaaaatcgagtgcttcgactccgtggaaatctccggcgtggaagatcggttcaacgcctccctgggcacataccacgatctgctgaaaattatcaaggacaaggacttcctggacaatgaggaaaacgaggacattctggaagatatcgtgctgaccctgacactgtttgaggacagagagatgatcgaggaacggctgaaaacctatgcccacctgttcgacgacaaagtgatgaagcagctgaagcggcggagatacaccggctggggcaggctgagccggaagctgatcaacggcatccgggacaagcagtccggcaagacaatcctggatttcctgaagtccgacggcttcgccaacagaaacttcatgcagctgatccacgacgacagcctgacctttaaagaggacatccagaaagcccaggtgtccggccagggcgatagcctgcacgagcacattgccaatctggccggcagccccgccattaagaagggcatcctgcagacagtgaaggtggtggacgagctcgtgaaagtgatgggccggcacaagcccgagaacatcgtgatcgaaatggccagagagaaccagaccacccagaagggacagaagaacagccgcgagagaatgaagcggatcgaagagggcatcaaagagctgggcagccagatcctgaaagaacaccccgtggaaaacacccagctgcagaacgagaagctgtacctgtactacctgcagaatgggcgggatatgtacgtggaccaggaactggacatcaaccggctgtccgactacgatgtggacgctatcgtgcctcagagctttctgaaggacgactccatcgataacaaagtgctgactcggagcgacaagaaccggggcaagagcgacaacgtgccctccgaagaggtcgtgaagaagatgaagaactactggcgccagctgctgaatgccaagctgattacccagaggaagttcgacaatctgaccaaggccgagagaggcggcctgagcgaactggataaggccggcttcatcaagagacagctggtggaaacccggcagatcacaaagcacgtggcacagatcctggactcccggatgaacactaagtacgacgagaacgacaaactgatccgggaagtgaaagtgatcaccctgaagtccaagctggtgtccgatttccggaaggatttccagttttacaaagtgcgcgagatcaacaactaccaccacgcccacgacgcctacctgaacgccgtcgtgggaaccgccctgatcaaaaagtaccctaagctggaaagcgagttcgtgtacggcgactacaaggtgtacgacgtgcggaagatgatcgccaagagcgagcaggaaatcggcaaggctaccgccaagtacttcttctacagcaacatcatgaactttttcaagaccgagattaccctggccaacggcgagatccggaagcggcctctgatcgagacaaacggcgaaacaggcgagatcgtgtgggataagggccgggactttgccaccgtgcggaaagtgctgtctatgccccaagtgaatatcgtgaaaaagaccgaggtgcagacaggcggcttcagcaaagagtctatcctgcccaagaggaacagcgacaagctgatcgccagaaagaaggactgggaccctaagaagtacggcggcttcgacagccccaccgtggcctattctgtgctggtggtggccaaagtggaaaagggcaagtccaagaaactgaagagtgtgaaagagctgctggggatcaccatcatggaaagaagcagcttcgagaagaatcccatcgactttctggaagccaagggctacaaagaagtgaaaaaggacctgatcatcaagctgcctaagtactccctgttcgagctggaaaacggccggaagagaatgctggcctctgccggcgaactgcagaagggaaacgaactggccctgccctccaaatatgtgaacttcctgtacctggccagccactatgagaagctgaagggctcccccgaggataatgagcagaaacagctgtttgtggaacagcacaaacactacctggacgagatcatcgagcagatcagcgagttctccaagagagtgatcctggccgacgctaatctggacaaggtgctgagcgcctacaacaagcacagagacaagcctatcagagagcaggccgagaatatcatccacctgtttaccctgaccaatctgggagcccctgccgccttcaagtactttgacaccaccatcgaccggaagaggtacaccagcaccaaagaggtgctggacgccaccctgatccaccagagcatcaccggcctgtacgagacacggatcgacctgtctcagctgggaggcgacccaaaaaagaagagaaaggtaagcggaagtgagaccccaggtacatccgaatcagcaacgcctgaaagcaccggtcggacactggtgaccttcaaggatgtatttgtggacttcaccagggaggagtggaagctgctggacactgctcagcagatcgtgtacagaaatgtgatgctggagaactataagaacctggtttccttgggttatcagcttactaagccagatgtgatcctccggttggagaagggagaagagccc

SEQ ID NO: 1502 - protein, 2219 aa, Synthetic construct
MNHDQEFDPPKVYPPVPAEKRKPIRVLSLFDGIATGLLVLKDLGIQVDRYIASEVCEDSITVGMVRHQGKIMYVGDVRSVTQKHIQEWGPFDLVIGGSPCNDLSIVNPARKGLYEGTGRLFFEFYRLLHDARPKEGDDRPFFWLFENVVAMGVSDKRDISRFLESNPVMIDAKEVSAAHRARYFWGNLPGMNRPLASTVNDKLELQECLEHGRIAKFSKVRTITTRSNSIKQGKDQHFPVFMNEKEDILWCTEMERVFGFPVHYTDVSNMSRLARQRLLGRSWSVPVIRHLFAPLKEYFACVSSGNSNANSRGPSFSSGLVPLSLRGSHMEVKVNRRSIEDICLCCGTLQVYTRHPLFEGGLCAPCKDKFLESLFLYDDDGHQSYCTICCSGGTLFICESPDCTRCYCFECVDILVGPGTSERINAMACWVCFLCLPFSRSGLLQRRKRWRHQLKAFHDQEGAGPMEIYKTVSAWKRQPVRVLSLFRNIDKVLKSLGFLESGSGSGGGTLKYVEDVTNVVRRDVEKWGPFDLVYGSTQPLGSSCDRCPGWYMFQFHRILQYALPRQESQRPFFWIFMDNLLLTEDDQETTTRFLQTEAVTLQDVRGRDYQNAMRVWSNIPGLKSKHAPLTPKEEEYLQAQVRSRSKLDAPKVDLLVKNCLLPLREYFKYFSQNSLPLGGPSSGAPPPSGGSPAGSPTSTEEGTSESATPESGPGTSTEPSEGSAPGSPAGSPTSTEEGTSTEPSEGSAPGTSTEPSEPKKKRKVMDKKYSIGLAIGTNSVGWAVITDEYKVPSKKFKVLGNTDRHSIKKNLIGALLFDSGETAEATRLKRTARRRYTRRKNRICYLQEIFSNEMAKVDDSFFHRLEESFLVEEDKKHERHPIFGNIVDEVAYHEKYPTIYHLRKKLVDSTDKADLRLIYLALAHMIKFRGHFLIEGDLNPDNSDVDKLFIQLVQTYNQLFEENPINASGVDAKAILSARLSKSRRLENLIAQLPGEKKNGLFGNLIALSLGLTPNFKSNFDLAEDAKLQLSKDTYDDDLDNLLAQIGDQYADLFLAAKNLSDAILLSDILRVNTEITKAPLSASMIKRYDEHHQDLTLLKALVRQQLPEKYKEIFFDQSKNGYAGYIDGGASQEEFYKFIKPILEKMDGTEELLVKLNREDLLRKQRTFDNGSIPHQIHLGELHAILRRQEDFYPFLKDNREKIEKILTFRIPYYVGPLARGNSRFAWMTRKSEETITPWNFEEVVDKGASAQSFIERMTNFDKNLPNEKVLPKHSLLYEYFTVYNELTKVKYVTEGMRKPAFLSGEQKKAIVDLLFKTNRKVTVKQLKEDYFKKIECFDSVEISGVEDRFNASLGTYHDLLKIIKDKDFLDNEENEDILEDIVLTLTLFEDREMIEERLKTYAHLFDDKVMKQLKRRRYTGWGRLSRKLINGIRDKQSGKTILDFLKSDGFANRNFMQLIHDDSLTFKEDIQKAQVSGQGDSLHEHIANLAGSPAIKKGILQTVKVVDELVKVMGRHKPENIVIEMARENQTTQKGQKNSRERMKRIEEGIKELGSQILKEHPVENTQLQNEKLYLYYLQNGRDMYVDQELDINRLSDYDVDAIVPQSFLKDDSIDNKVLTRSDKNRGKSDNVPSEEVVKKMKNYWRQLLNAKLITQRKFDNLTKAERGGLSELDKAGFIKRQLVETRQITKHVAQILDSRMNTKYDENDKLIREVKVITLKSKLVSDFRKDFQFYKVREINNYHHAHDAYLNAVVGTALIKKYPKLESEFVYGDYKVYDVRKMIAKSEQEIGKATAKYFFYSNIMNFFKTEITLANGEIRKRPLIETNGETGEIVWDKGRDFATVRKVLSMPQVNIVKKTEVQTGGFSKESILPKRNSDKLIARKKDWDPKKYGGFDSPTVAYSVLVVAKVEKGKSKKLKSVKELLGITIMERSSFEKNPIDFLEAKGYKEVKKDLIIKLPKYSLFELENGRKRMLASAGELQKGNELALPSKYVNFLYLASHYEKLKGSPEDNEQKQLFVEQHKHYLDEIIEQISEFSKRVILADANLDKVLSAYNKHRDKPIREQAENIIHLFTLTNLGAPAAFKYFDTTIDRKRYTSTKEVLDATLIHQSITGLYETRIDLSQLGGDPKKKRKVSGSETPGTSESATPESTGRTLVTFKDVFVDFTREEWKLLDTAQQIVYRNVMLENYKNLVSLGYQLTKPDVILRLEKGEEP

SEQ ID NO: 1503 - DNA, 6657 bp, Synthetic construct
  source 1..6657: mol_type = other DNA
atgaaccatgaccaggaatttgaccccccaaaggtttacccacctgtgccagctgagaagaggaagcccatccgcgtgctgtctctctttgatgggattgctacagggctcctggtgctgaaggacctgggcatccaagtggaccgctacattgcctccgaggtgtgtgaggactccatcacggtgggcatggtgcggcaccagggaaagatcatgtacgtcggggacgtccgcagcgtcacacagaagcatatccaggagtggggcccattcgacctggtgattggaggcagtccctgcaatgacctctccattgtcaaccctgcccgcaagggactttatgagggtactggccgcctcttctttgagttctaccgcctcctgcatgatgcgcggcccaaggagggagatgatcgccccttcttctggctctttgagaatgtggtggccatgggcgttagtgacaagagggacatctcgcgatttcttgagtctaaccccgtgatgattgacgccaaagaagtgtctgctgcacacagggcccgttacttctggggtaaccttcctggcatgaacaggcctttggcatccactgtgaatgataagctggagctgcaagagtgtctggagcacggcagaatagccaagttcagcaaagtgaggaccattaccaccaggtcaaactctataaagcagggcaaagaccagcatttccccgtcttcatgaacgagaaggaggacatcctgtggtgcactgaaatggaaagggtgtttggcttccccgtccactacacagacgtctccaacatgagccgcttggcgaggcagagactgctgggccgatcgtggagcgtgccggtcatccgccacctcttcgctccgctgaaggaatattttgcttgtgtgtctagcggcaatagtaacgctaacagccgcgggccgagcttcagcagcggcctggtgccgttaagcttgcgcggcagccatatggaagtcaaagtgaaccgacggagcattgaagacatctgcctctgctgtggaactctccaggtgtacactcggcaccccttgtttgagggagggttatgtgccccatgtaaggataagttcctggagtccctcttcctgtatgatgatgatggacaccagagttactgcaccatctgctgttccgggggtaccctgttcatctgtgagagccccgactgtaccagatgctactgtttcgagtgtgtggacatcctggtgggccccgggacctcagagaggatcaatgccatggcctgctgggtttgcttcctgtgcctgcccttctcacggagtggactgctgcagaggcgcaagaggtggcggcaccagctgaaggccttccatgatcaagagggagcgggccctatggagatatacaagacagtgtctgcatggaagagacagccagtgcgggtactgagcctcttcagaaacatcgacaaggtactaaagagtttgggcttcttggaaagcggttctggttctgggggaggaacgctgaagtacgtggaagatgtcacaaatgtcgtgaggagagacgtggagaaatggggcccctttgacctggtgtacggctcgacgcagcccctaggcagctcttgtgatcgctgtcccggctggtacatgttccagttccaccggatcctgcagtatgcgctgcctcgccaggagagtcagcggcccttcttctggatattcatggacaatctgctgctgactgaggatgaccaagagacaactacccgcttccttcagacagaggctgtgaccctccaggatgtccgtggcagagactaccagaatgctatgcgggtgtggagcaacattccagggctgaagagcaagcatgcgcccctgaccccaaaggaagaagagtatctgcaagcccaagtcagaagcaggagcaagctggacgccccgaaagttgacctcctggtgaagaactgccttctcccgctgagagagtacttcaagtatttttctcaaaactcacttcctcttggagggccgagctctggcgcacccccaccaagtggagggtctcctgccgggtccccaacatctactgaagaaggcaccagcgaatccgcaacgcccgagtcaggccctggtacctccacagaaccatctgaaggtagtgcgcctggttccccagctggaagccctacttccaccgaagaaggcacgtcaaccgaaccaagtgaaggatctgcccctgggaccagcactgaaccatctgagccaaaaaagaagagaaaggtaatggacaagaagtacagcatcggcctggccatcggcaccaactctgtgggctgggccgtgatcaccgacgagtacaaggtgcccagcaagaaattcaaggtgctgggcaacaccgaccggcacagcatcaagaagaacctgatcggcgccctgctgttcgacagcggagaaacagccgaggccacccggctgaagagaaccgccagaagaagatacaccagacggaagaaccggatctgctatctgcaagagatcttcagcaacgagatggccaaggtggacgacagcttcttccacagactggaagagtccttcctggtggaagaggataagaagcacgagcggcaccccatcttcggcaacatcgtggacgaggtggcctaccacgagaagtaccccaccatctaccacctgagaaagaaactggtggacagcaccgacaaggccgacctgcggctgatctatctggccctggcccacatgatcaagttccggggccacttcctgatcgagggcgacctgaaccccgacaacagcgacgtggacaagctgttcatccagctggtgcagacctacaaccagctgttcgaggaaaaccccatcaacgccagcggcgtggacgccaaggccatcctgtctgccagactgagcaagagcagacggctggaaaatctgatcgcccagctgcccggcgagaagaagaatggcctgttcggcaacctgattgccctgagcctgggcctgacccccaacttcaagagcaacttcgacctggccgaggatgccaaactgcagctgagcaaggacacctacgacgacgacctggacaacctgctggcccagatcggcgaccagtacgccgacctgtttctggccgccaagaacctgtccgacgccatcctgctgagcgacatcctgagagtgaacaccgagatcaccaaggcccccctgagcgcctctatgatcaagagatacgacgagcaccaccaggacctgaccctgctgaaagctctcgtgcggcagcagctgcctgagaagtacaaagagattttcttcgaccagagcaagaacggctacgccggctacatcgatggcggagccagccaggaagagttctacaagttcatcaagcccatcctggaaaagatggacggcaccgaggaactgctcgtgaagctgaacagagaggacctgctgcggaagcagcggaccttcgacaacggcagcatcccccaccagatccacctgggagagctgcacgccattctgcggcggcaggaagatttttacccattcctgaaggacaaccgggaaaagatcgagaagatcctgaccttccgcatcccctactacgtgggccctctggccaggggaaacagcagattcgcctggatgaccagaaagagcgaggaaaccatcaccccctggaacttcgaggaagtggtggacaagggcgccagcgcccagagcttcatcgagcggatgaccaacttcgataagaacctgcccaacgagaaggtgctgcccaagcacagcctgctgtacgagtacttcaccgtgtacaacgagctgaccaaagtgaaatacgtgaccgagggaatgagaaagcccgccttcctgagcggcgagcagaaaaaagccatcgtggacctgctgttcaagaccaaccggaaagtgaccgtgaagcagctgaaagaggactacttcaagaaaatcgagtgcttcgactccgtggaaatctccggcgtggaagatcggttcaacgcctccctgggcacataccacgatctgctgaaaattatcaaggacaaggacttcctggacaatgaggaaaacgaggacattctggaagatatcgtgctgaccctgacactgtttgaggacagagagatgatcgaggaacggctgaaaacctatgcccacctgttcgacgacaaagtgatgaagcagctgaagcggcggagatacaccggctggggcaggctgagccggaagctgatcaacggcatccgggacaagcagtccggcaagacaatcctggatttcctgaagtccgacggcttcgccaacagaaacttcatgcagctgatccacgacgacagcctgacctttaaagaggacatccagaaagcccaggtgtccggccagggcgatagcctgcacgagcacattgccaatctggccggcagccccgccattaagaagggcatcctgcagacagtgaaggtggtggacgagctcgtgaaagtgatgggccggcacaagcccgagaacatcgtgatcgaaatggccagagagaaccagaccacccagaagggacagaagaacagccgcgagagaatgaagcggatcgaagagggcatcaaagagctgggcagccagatcctgaaagaacaccccgtggaaaacacccagctgcagaacgagaagctgtacctgtactacctgcagaatgggcgggatatgtacgtggaccaggaactggacatcaaccggctgtccgactacgatgtggacgctatcgtgcctcagagctttctgaaggacgactccatcgataacaaagtgctgactcggagcgacaagaaccggggcaagagcgacaacgtgccctccgaagaggtcgtgaagaagatgaagaactactggcgccagctgctgaatgccaagctgattacccagaggaagttcgacaatctgaccaaggccgagagaggcggcctgagcgaactggataaggccggcttcatcaagagacagctggtggaaacccggcagatcacaaagcacgtggcacagatcctggactcccggatgaacactaagtacgacgagaacgacaaactgatccgggaagtgaaagtgatcaccctgaagtccaagctggtgtccgatttccggaaggatttccagttttacaaagtgcgcgagatcaacaactaccaccacgcccacgacgcctacctgaacgccgtcgtgggaaccgccctgatcaaaaagtaccctaagctggaaagcgagttcgtgtacggcgactacaaggtgtacgacgtgcggaagatgatcgccaagagcgagcaggaaatcggcaaggctaccgccaagtacttcttctacagcaacatcatgaactttttcaagaccgagattaccctggccaacggcgagatccggaagcggcctctgatcgagacaaacggcgaaacaggcgagatcgtgtgggataagggccgggactttgccaccgtgcggaaagtgctgtctatgccccaagtgaatatcgtgaaaaagaccgaggtgcagacaggcggcttcagcaaagagtctatcctgcccaagaggaacagcgacaagctgatcgccagaaagaaggactgggaccctaagaagtacggcggcttcgacagccccaccgtggcctattctgtgctggtggtggccaaagtggaaaagggcaagtccaagaaactgaagagtgtgaaagagctgctggggatcaccatcatggaaagaagcagcttcgagaagaatcccatcgactttctggaagccaagggctacaaagaagtgaaaaaggacctgatcatcaagctgcctaagtactccctgttcgagctggaaaacggccggaagagaatgctggcctctgccggcgaactgcagaagggaaacgaactggccctgccctccaaatatgtgaacttcctgtacctggccagccactatgagaagctgaagggctcccccgaggataatgagcagaaacagctgtttgtggaacagcacaaacactacctggacgagatcatcgagcagatcagcgagttctccaagagagtgatcctggccgacgctaatctggacaaggtgctgagcgcctacaacaagcacagagacaagcctatcagagagcaggccgagaatatcatccacctgtttaccctgaccaatctgggagcccctgccgccttcaagtactttgacaccaccatcgaccggaagaggtacaccagcaccaaagaggtgctggacgccaccctgatccaccagagcatcaccggcctgtacgagacacggatcgacctgtctcagctgggaggcgacccaaaaaagaagagaaaggtaagcggaagtgagaccccaggtacatccgaatcagcaacgcctgaaagcaccggtcggacactggtgaccttcaaggatgtatttgtggacttcaccagggaggagtggaagctgctggacactgctcagcagatcgtgtacagaaatgtgatgctggagaactataagaacctggtttccttgggttatcagcttactaagccagatgtgatcctccggttggagaagggagaagagccc

SEQ ID NO: 1504 - protein, 2218 aa, Synthetic construct
MNHDQEFDPPKVYPPVPAEKRKPIRVLSLFDGIATGLLVLKDLGIQVDRYIASEVCEDSITVGMVRHQGKIMYVGDVRSVTQKHIQEWGPFDLVIGGSPCNDLSIVNPARKGLYEGTGRLFFEFYRLLHDARPKEGDDRPFFWLFENVVAMGVSDKRDISRFLESNPVMIDAKEVSAAHRARYFWGNLPGMNRPLASTVNDKLELQECLEHGRIAKFSKVRTITTRSNSIKQGKDQHFPVFMNEKEDILWCTEMERVFGFPVHYTDVSNMSRLARQRLLGRSWSVPVIRHLFAPLKEYFACVSSGNSNANSRGPSFSSGLVPLSLRGSHMEVKANQRNIEDICICCGSLQVHTQHPLFEGGICAPCKDKFLDALFLYDDDGYQSYCSICCSGETLLICGNPDCTRCYCFECVDSLVGPGTSGKVHAMSNWVCYLCLPSSRSGLLQRRRKWRSQLKAFYDRESENPLEMFETVPVWRRQPVRVLSLFEDIKKELTSLGFLESGSDPGQLKHVVDVTDTVRKDVEEWGPFDLVYGATPPLGHTCDRPPSWYLFQFHRLLQYARPKPGSPRPFFWMFVDNLVLNKEDLDVASRFLEMEPVTIPDVHGGSLQNAVRVWSNIPAIRSRHWALVSEEELSLLAQNKQSSKLAAKWPTKLVKNCFLPLREYFKYFSTELTSSLGGPSSGAPPPSGGSPAGSPTSTEEGTSESATPESGPGTSTEPSEGSAPGSPAGSPTSTEEGTSTEPSEGSAPGTSTEPSEPKKKRKVMDKKYSIGLAIGTNSVGWAVITDEYKVPSKKFKVLGNTDRHSIKKNLIGALLFDSGETAEATRLKRTARRRYTRRKNRICYLQEIFSNEMAKVDDSFFHRLEESFLVEEDKKHERHPIFGNIVDEVAYHEKYPTIYHLRKKLVDSTDKADLRLIYLALAHMIKFRGHFLIEGDLNPDNSDVDKLFIQLVQTYNQLFEENPINASGVDAKAILSARLSKSRRLENLIAQLPGEKKNGLFGNLIALSLGLTPNFKSNFDLAEDAKLQLSKDTYDDDLDNLLAQIGDQYADLFLAAKNLSDAILLSDILRVNTEITKAPLSASMIKRYDEHHQDLTLLKALVRQQLPEKYKEIFFDQSKNGYAGYIDGGASQEEFYKFIKPILEKMDGTEELLVKLNREDLLRKQRTFDNGSIPHQIHLGELHAILRRQEDFYPFLKDNREKIEKILTFRIPYYVGPLARGNSRFAWMTRKSEETITPWNFEEVVDKGASAQSFIERMTNFDKNLPNEKVLPKHSLLYEYFTVYNELTKVKYVTEGMRKPAFLSGEQKKAIVDLLFKTNRKVTVKQLKEDYFKKIECFDSVEISGVEDRFNASLGTYHDLLKIIKDKDFLDNEENEDILEDIVLTLTLFEDREMIEERLKTYAHLFDDKVMKQLKRRRYTGWGRLSRKLINGIRDKQSGKTILDFLKSDGFANRNFMQLIHDDSLTFKEDIQKAQVSGQGDSLHEHIANLAGSPAIKKGILQTVKVVDELVKVMGRHKPENIVIEMARENQTTQKGQKNSRERMKRIEEGIKELGSQILKEHPVENTQLQNEKLYLYYLQNGRDMYVDQELDINRLSDYDVDAIVPQSFLKDDSIDNKVLTRSDKNRGKSDNVPSEEVVKKMKNYWRQLLNAKLITQRKFDNLTKAERGGLSELDKAGFIKRQLVETRQITKHVAQILDSRMNTKYDENDKLIREVKVITLKSKLVSDFRKDFQFYKVREINNYHHAHDAYLNAVVGTALIKKYPKLESEFVYGDYKVYDVRKMIAKSEQEIGKATAKYFFYSNIMNFFKTEITLANGEIRKRPLIETNGETGEIVWDKGRDFATVRKVLSMPQVNIVKKTEVQTGGFSKESILPKRNSDKLIARKKDWDPKKYGGFDSPTVAYSVLVVAKVEKGKSKKLKSVKELLGITIMERSSFEKNPIDFLEAKGYKEVKKDLIIKLPKYSLFELENGRKRMLASAGELQKGNELALPSKYVNFLYLASHYEKLKGSPEDNEQKQLFVEQHKHYLDEIIEQISEFSKRVILADANLDKVLSAYNKHRDKPIREQAENIIHLFTLTNLGAPAAFKYFDTTIDRKRYTSTKEVLDATLIHQSITGLYETRIDLSQLGGDPKKKRKVSGSETPGTSESATPESTGRTLVTFKDVFVDFTREEWKLLDTAQQIVYRNVMLENYKNLVSLGYQLTKPDVILRLEKGEEP

SEQ ID NO: 1505 - DNA, 6654 bp, Synthetic construct
  source 1..6654: mol_type = other DNA
atgaaccatgatcaagaattcgacccacctaaagtctacccacctgtgcccgccgaaaaaaggaaacccataagggtgctgtcactctttgatggcatcgccactggtctcctggttcttaaggatctgggaattcaggtcgatcggtacattgctagcgaggtttgtgaggatagtattacagtgggtatggtgcgccaccagggaaagatcatgtatgttggtgacgttaggagcgtcacccagaaacatatccaggagtggggaccctttgatttggtgatcggaggtagtccctgcaatgacctttccatcgtgaatccagccaggaaagggctgtatgaagggactggtaggctctttttcgagttttatcgcctgcttcacgacgctagacctaaggaaggtgacgataggcctttcttttggctttttgagaacgtcgtggcaatgggagtctccgacaaaagggacatttctcgctttctggaatctaaccccgttatgatcgatgccaaggaagtttctgccgctcacagggcaaggtacttctggggcaatctgcccggaatgaatcgcccactggccagtaccgtgaatgacaaactggagctgcaggagtgcctggagcacggaagaatcgcaaagttttctaaagtcaggaccattaccactcgcagtaactccataaaacagggtaaggaccagcattttcccgtcttcatgaatgaaaaggaagatattctgtggtgcactgaaatggagagagttttcgggtttcccgtgcactataccgatgtttccaacatgtcccgccttgcaagacaaaggcttttgggccgctcttggtctgtgccagtgatccggcacttgtttgctcccctcaaagagtacttcgcttgcgtcagttccggaaattcaaacgctaactctcggggtccatctttctccagtggtctcgtgccactgtctctccggggctctcacatggaagtcaaggctaaccagcgaaatatagaagacatctgcatctgctgcggaagtctccaggttcacacacagcaccctctgtttgagggagggatctgcgccccatgtaaggacaagttcctggatgccctcttcctgtacgacgatgacgggtaccaatcctactgctccatctgctgctccggagagacgctgctcatctgcggaaaccctgattgcacccgatgctactgcttcgagtgtgtggatagcctggtcggccccgggacctcggggaaggtgcacgccatgagcaactgggtgtgctacctgtgcctgccgtcctcccgaagcgggctgctgcagcgtcggaggaagtggcgcagccagctcaaggccttctacgaccgagagtcggagaatcccctggagatgtttgagacagtgccagtctggcggaggcagcccgttcgcgttctctctctgttcgaagatattaaaaaggaactcacctcccttgggttcctggagagcgggagcgaccccggacagcttaagcacgtggtcgacgtgactgacaccgtccgcaaagacgtggaggaatggggccccttcgatctggtctatggggcaacccctccccttgggcatacatgtgatcggcctccatcctggtacctgttccagtttcacagactcctgcagtatgccaggccaaagccagggagcccaaggccctttttctggatgttcgtcgacaacctggtcctgaacaaagaagatctcgacgttgctagtcgctttctcgaaatggagcccgtgaccattcccgacgtgcatggcggttccctccagaatgcagtcagggtttggagcaatatccctgccatcaggtcaaggcactgggcactggtttcagaggaagagctgtccctccttgcccagaacaagcagtcatccaaactggcagccaagtggccaactaagctggtcaagaactgctttcttcccctcagagaatattttaagtatttcagtactgaactgactagcagtctgggagggccgagctctggcgcacccccaccaagtggagggtctcctgccgggtccccaacatctactgaagaaggcaccagcgaatccgcaacgcccgagtcaggccctggtacctccacagaaccatctgaaggtagtgcgcctggttccccagctggaagccctacttccaccgaagaaggcacgtcaaccgaaccaagtgaaggatctgcccctgggaccagcactgaaccatctgagccaaaaaagaagagaaaggtaatggacaagaagtacagcatcggcctggccatcggcaccaactctgtgggctgggccgtgatcaccgacgagtacaaggtgcccagcaagaaattcaaggtgctgggcaacaccgaccggcacagcatcaagaagaacctgatcggcgccctgctgttcgacagcggagaaacagccgaggccacccggctgaagagaaccgccagaagaagatacaccagacggaagaaccggatctgctatctgcaagagatcttcagcaacgagatggccaaggtggacgacagcttcttccacagactggaagagtccttcctggtggaagaggataagaagcacgagcggcaccccatcttcggcaacatcgtggacgaggtggcctaccacgagaagtaccccaccatctaccacctgagaaagaaactggtggacagcaccgacaaggccgacctgcggctgatctatctggccctggcccacatgatcaagttccggggccacttcctgatcgagggcgacctgaaccccgacaacagcgacgtggacaagctgttcatccagctggtgcagacctacaaccagctgttcgaggaaaaccccatcaacgccagcggcgtggacgccaaggccatcctgtctgccagactgagcaagagcagacggctggaaaatctgatcgcccagctgcccggcgagaagaagaatggcctgttcggcaacctgattgccctgagcctgggcctgacccccaacttcaagagcaacttcgacctggccgaggatgccaaactgcagctgagcaaggacacctacgacgacgacctggacaacctgctggcccagatcggcgaccagtacgccgacctgtttctggccgccaagaacctgtccgacgccatcctgctgagcgacatcctgagagtgaacaccgagatcaccaaggcccccctgagcgcctctatgatcaagagatacgacgagcaccaccaggacctgaccctgctgaaagctctcgtgcggcagcagctgcctgagaagtacaaagagattttcttcgaccagagcaagaacggctacgccggctacatcgatggcggagccagccaggaagagttctacaagttcatcaagcccatcctggaaaagatggacggcaccgaggaactgctcgtgaagctgaacagagaggacctgctgcggaagcagcggaccttcgacaacggcagcatcccccaccagatccacctgggagagctgcacgccattctgcggcggcaggaagatttttacccattcctgaaggacaaccgggaaaagatcgagaagatcctgaccttccgcatcccctactacgtgggccctctggccaggggaaacagcagattcgcctggatgaccagaaagagcgaggaaaccatcaccccctggaacttcgaggaagtggtggacaagggcgccagcgcccagagcttcatcgagcggatgaccaacttcgataagaacctgcccaacgagaaggtgctgcccaagcacagcctgctgtacgagtacttcaccgtgtacaacgagctgaccaaagtgaaatacgtgaccgagggaatgagaaagcccgccttcctgagcggcgagcagaaaaaagccatcgtggacctgctgttcaagaccaaccggaaagtgaccgtgaagcagctgaaagaggactacttcaagaaaatcgagtgcttcgactccgtggaaatctccggcgtggaagatcggttcaacgcctccctgggcacataccacgatctgctgaaaattatcaaggacaaggacttcctggacaatgaggaaaacgaggacattctggaagatatcgtgctgaccctgacactgtttgaggacagagagatgatcgaggaacggctgaaaacctatgcccacctgttcgacgacaaagtgatgaagcagctgaagcggcggagatacaccggctggggcaggctgagccggaagctgatcaacggcatccgggacaagcagtccggcaagacaatcctggatttcctgaagtccgacggcttcgccaacagaaacttcatgcagctgatccacgacgacagcctgacctttaaagaggacatccagaaagcccaggtgtccggccagggcgatagcctgcacgagcacattgccaatctggccggcagccccgccattaagaagggcatcctgcagacagtgaaggtggtggacgagctcgtgaaagtgatgggccggcacaagcccgagaacatcgtgatcgaaatggccagagagaaccagaccacccagaagggacagaagaacagccgcgagagaatgaagcggatcgaagagggcatcaaagagctgggcagccagatcctgaaagaacaccccgtggaaaacacccagctgcagaacgagaagctgtacctgtactacctgcagaatgggcgggatatgtacgtggaccaggaactggacatcaaccggctgtccgactacgatgtggacgctatcgtgcctcagagctttctgaaggacgactccatcgataacaaagtgctgactcggagcgacaagaaccggggcaagagcgacaacgtgccctccgaagaggtcgtgaagaagatgaagaactactggcgccagctgctgaatgccaagctgattacccagaggaagttcgacaatctgaccaaggccgagagaggcggcctgagcgaactggataaggccggcttcatcaagagacagctggtggaaacccggcagatcacaaagcacgtggcacagatcctggactcccggatgaacactaagtacgacgagaacgacaaactgatccgggaagtgaaagtgatcaccctgaagtccaagctggtgtccgatttccggaaggatttccagttttacaaagtgcgcgagatcaacaactaccaccacgcccacgacgcctacctgaacgccgtcgtgggaaccgccctgatcaaaaagtaccctaagctggaaagcgagttcgtgtacggcgactacaaggtgtacgacgtgcggaagatgatcgccaagagcgagcaggaaatcggcaaggctaccgccaagtacttcttctacagcaacatcatgaactttttcaagaccgagattaccctggccaacggcgagatccggaagcggcctctgatcgagacaaacggcgaaacaggcgagatcgtgtgggataagggccgggactttgccaccgtgcggaaagtgctgtctatgccccaagtgaatatcgtgaaaaagaccgaggtgcagacaggcggcttcagcaaagagtctatcctgcccaagaggaacagcgacaagctgatcgccagaaagaaggactgggaccctaagaagtacggcggcttcgacagccccaccgtggcctattctgtgctggtggtggccaaagtggaaaagggcaagtccaagaaactgaagagtgtgaaagagctgctggggatcaccatcatggaaagaagcagcttcgagaagaatcccatcgactttctggaagccaagggctacaaagaagtgaaaaaggacctgatcatcaagctgcctaagtactccctgttcgagctggaaaacggccggaagagaatgctggcctctgccggcgaactgcagaagggaaacgaactggccctgccctccaaatatgtgaacttcctgtacctggccagccactatgagaagctgaagggctcccccgaggataatgagcagaaacagctgtttgtggaacagcacaaacactacctggacgagatcatcgagcagatcagcgagttctccaagagagtgatcctggccgacgctaatctggacaaggtgctgagcgcctacaacaagcacagagacaagcctatcagagagcaggccgagaatatcatccacctgtttaccctgaccaatctgggagcccctgccgccttcaagtactttgacaccaccatcgaccggaagaggtacaccagcaccaaagaggtgctggacgccaccctgatccaccagagcatcaccggcctgtacgagacacggatcgacctgtctcagctgggaggcgacccaaaaaagaagagaaaggtaagcggaagtgagaccccaggtacatccgaatcagcaacgcctgaaagcaccggtcggacactggtgaccttcaaggatgtatttgtggacttcaccagggaggagtggaagctgctggacactgctcagcagatcgtgtacagaaatgtgatgctggagaactataagaacctggtttccttgggttatcagcttactaagccagatgtgatcctccggttggagaagggagaagagccc

SEQ ID NO: 1506 - protein, 2109 aa, Synthetic construct
MPKKKRKVPKKKRKVNHDQEFDPPKVYPPVPAEKRKPIRVLSLFDGIATGLLVLKDLGIQVDRYIASEVCEDSITVGMVRHQGKIMYVGDVRSVTQKHIQEWGPFDLVIGGSPCNDLSIVNPARKGLYEGTGRLFFEFYRLLHDARPKEGDDRPFFWLFENVVAMGVSDKRDISRFLESNPVMIDAKEVSAAHRARYFWGNLPGMNRPLASTVNDKLELQECLEHGRIAKFSKVRTITTRSNSIKQGKDQHFPVFMNEKEDILWCTEMERVFGFPVHYTDVSNMSRLARQRLLGRSWSVPVIRHLFAPLKEYFACVSSGNSNANSRGPSFSSGLVPLSLRGSHNPLEMFETVPVWRRQPVRVLSLFEDIKKELTSLGFLESGSDPGQLKHVVDVTDTVRKDVEEWGPFDLVYGATPPLGHTCDRPPSWYLFQFHRLLQYARPKPGSPRPFFWMFVDNLVLNKEDLDVASRFLEMEPVTIPDVHGGSLQNAVRVWSNIPAIRSRHWALVSEEELSLLAQNKQSSKLAAKWPTKLVKNCFLPLREYFKYFSTELTSSLGGPSSGAPPPSGGSPAGSPTSTEEGTSESATPESGPGTSTEPSEGSAPGSPAGSPTSTEEGTSTEPSEGSAPGTSTEPSEMDKKYSIGLAIGTNSVGWAVITDEYKVPSKKFKVLGNTDRHSIKKNLIGALLFDSGETAEATRLKRTARRRYTRRKNRICYLQEIFSNEMAKVDDSFFHRLEESFLVEEDKKHERHPIFGNIVDEVAYHEKYPTIYHLRKKLVDSTDKADLRLIYLALAHMIKFRGHFLIEGDLNPDNSDVDKLFIQLVQTYNQLFEENPINASGVDAKAILSARLSKSRRLENLIAQLPGEKKNGLFGNLIALSLGLTPNFKSNFDLAEDAKLQLSKDTYDDDLDNLLAQIGDQYADLFLAAKNLSDAILLSDILRVNTEITKAPLSASMIKRYDEHHQDLTLLKALVRQQLPEKYKEIFFDQSKNGYAGYIDGGASQEEFYKFIKPILEKMDGTEELLVKLNREDLLRKQRTFDNGSIPHQIHLGELHAILRRQEDFYPFLKDNREKIEKILTFRIPYYVGPLARGNSRFAWMTRKSEETITPWNFEEVVDKGASAQSFIERMTNFDKNLPNEKVLPKHSLLYEYFTVYNELTKVKYVTEGMRKPAFLSGEQKKAIVDLLFKTNRKVTVKQLKEDYFKKIECFDSVEISGVEDRFNASLGTYHDLLKIIKDKDFLDNEENEDILEDIVLTLTLFEDREMIEERLKTYAHLFDDKVMKQLKRRRYTGWGRLSRKLINGIRDKQSGKTILDFLKSDGFANRNFMQLIHDDSLTFKEDIQKAQVSGQGDSLHEHIANLAGSPAIKKGILQTVKVVDELVKVMGRHKPENIVIEMARENQTTQKGQKNSRERMKRIEEGIKELGSQILKEHPVENTQLQNEKLYLYYLQNGRDMYVDQELDINRLSDYDVDAIVPQSFLKDDSIDNKVLTRSDKNRGKSDNVPSEEVVKKMKNYWRQLLNAKLITQRKFDNLTKAERGGLSELDKAGFIKRQLVETRQITKHVAQILDSRMNTKYDENDKLIREVKVITLKSKLVSDFRKDFQFYKVREINNYHHAHDAYLNAVVGTALIKKYPKLESEFVYGDYKVYDVRKMIAKSEQEIGKATAKYFFYSNIMNFFKTEITLANGEIRKRPLIETNGETGEIVWDKGRDFATVRKVLSMPQVNIVKKTEVQTGGFSKESILPKRNSDKLIARKKDWDPKKYGGFDSPTVAYSVLVVAKVEKGKSKKLKSVKELLGITIMERSSFEKNPIDFLEAKGYKEVKKDLIIKLPKYSLFELENGRKRMLASAGELQKGNELALPSKYVNFLYLASHYEKLKGSPEDNEQKQLFVEQHKHYLDEIIEQISEFSKRVILADANLDKVLSAYNKHRDKPIREQAENIIHLFTLTNLGAPAAFKYFDTTIDRKRYTSTKEVLDATLIHQSITGLYETRIDLSQLGGDSGSETPGTSESATPESTGRTLVTFKDVFVDFTREEWKLLDTAQQIVYRNVMLENYKNLVSLGYQLTKPDVILRLEKGEEPSADYKDDDDKAPKKKRKVPKKKRKV

SEQ ID NO: 1507 - DNA, 6327 bp, Synthetic construct
  source 1..6327: mol_type = other DNA
atgccaaaaaagaagagaaaggtaccgaagaaaaaaagaaaggtcaaccacgaccaggaattcgaccctccaaaggtttacccacctgtcccagctgagaagaggaagcccatccgggtgctgtctctctttgatggaatcgctacagggctcctggtgctgaaggacttgggcattcaggtggaccgctacattgcctcggaggtgtgtgaggactccatcacggtgggcatggtgcggcaccaggggaagatcatgtacgtcggggacgtccgcagcgtcacacagaagcatatccaggagtggggcccattcgatctggtgattgggggcagtccctgcaatgacctctccatcgtcaaccctgctcgcaagggcctctacgagggcactggccggctcttctttgagttctaccgcctcctgcatgatgcgcggcccaaggagggagatgatcgccccttcttctggctctttgagaatgtggtggccatgggcgttagtgacaagagggacatctcgcgatttctcgagtccaaccctgtgatgattgatgccaaagaagtgtcagctgcacacagggcccgctacttctggggtaaccttcccggtatgaacaggccgttggcatccactgtgaatgataagctggagctgcaggagtgtctggagcatggcaggatagccaagttcagcaaagtgaggaccattactacgaggtcaaactccataaagcagggcaaagaccagcattttcctgtcttcatgaatgagaaagaggacatcttatggtgcactgaaatggaaagggtatttggtttcccagtccactatactgacgtctccaacatgagccgcttggcgaggcagagactgctgggccggtcatggagcgtgccagtcatccgccacctcttcgctccgctgaaggagtattttgcgtgtgtgtctagcggcaatagtaacgctaacagccgcgggccgagcttcagcagcggcctggtgccgttaagcttgcgcggcagccataatccccttgagatgttcgaaaccgtgcctgtgtggaggagacagccagtccgggtgctgtccctttttgaagacatcaagaaagagctgacgagtttgggctttttggaaagtggttctgacccgggacaactgaagcatgtggttgatgtcacagacacagtgaggaaggatgtggaggagtggggacccttcgatcttgtgtacggcgccacacctcccctgggccacacctgtgaccgtcctcccagctggtacctgttccagttccaccggctcctgcagtacgcacggcccaagccaggcagccccaggcccttcttctggatgttcgtggacaatctggtgctgaacaaggaagacctggacgtcgcatctcgcttcctggagatggagccagtcaccatcccagatgtccacggcggatccttgcagaatgctgtccgcgtgtggagcaacatcccagccataaggagcaggcactgggctctggtttcggaagaagaattgtccctgctggcccagaacaagcagagctcgaagctcgcggccaagtggcccaccaagctggtgaagaactgctttctccccctaagagaatatttcaagtatttttcaacagaactcacttcctctttaggagggccgagctctggcgcacccccaccaagtggagggtctcctgccgggtccccaacatctactgaagaaggcaccagcgaatccgcaacgcccgagtcaggccctggtacctccacagaaccatctgaaggtagtgcgcctggttccccagctggaagccctacttccaccgaagaaggcacgtcaaccgaaccaagtgaaggatctgcccctgggaccagcactgaaccatctgagatggacaagaagtacagcatcggcctggccatcggcaccaactctgtgggctgggccgtgatcaccgacgagtacaaggtgcccagcaagaaattcaaggtgctgggcaacaccgaccggcacagcatcaagaagaacctgatcggcgccctgctgttcgacagcggagaaacagccgaggccacccggctgaagagaaccgccagaagaagatacaccagacggaagaaccggatctgctatctgcaagagatcttcagcaacgagatggccaaggtggacgacagcttcttccacagactggaagagtccttcctggtggaagaggataagaagcacgagcggcaccccatcttcggcaacatcgtggacgaggtggcctaccacgagaagtaccccaccatctaccacctgagaaagaaactggtggacagcaccgacaaggccgacctgcggctgatctatctggccctggcccacatgatcaagttccggggccacttcctgatcgagggcgacctgaaccccgacaacagcgacgtggacaagctgttcatccagctggtgcagacctacaaccagctgttcgaggaaaaccccatcaacgccagcggcgtggacgccaaggccatcctgtctgccagactgagcaagagcagacggctggaaaatctgatcgcccagctgcccggcgagaagaagaatggcctgttcggcaacctgattgccctgagcctgggcctgacccccaacttcaagagcaacttcgacctggccgaggatgccaaactgcagctgagcaaggacacctacgacgacgacctggacaacctgctggcccagatcggcgaccagtacgccgacctgtttctggccgccaagaacctgtccgacgccatcctgctgagcgacatcctgagagtgaacaccgagatcaccaaggcccccctgagcgcctctatgatcaagagatacgacgagcaccaccaggacctgaccctgctgaaagctctcgtgcggcagcagctgcctgagaagtacaaagagattttcttcgaccagagcaagaacggctacgccggctacatcgatggcggagccagccaggaagagttctacaagttcatcaagcccatcctggaaaagatggacggcaccgaggaactgctcgtgaagctgaacagagaggacctgctgcggaagcagcggaccttcgacaacggcagcatcccccaccagatccacctgggagagctgcacgccattctgcggcggcaggaagatttttacccattcctgaaggacaaccgggaaaagatcgagaagatcctgaccttccgcatcccctactacgtgggccctctggccaggggaaacagcagattcgcctggatgaccagaaagagcgaggaaaccatcaccccctggaacttcgaggaagtggtggacaagggcgccagcgcccagagcttcatcgagcggatgaccaacttcgataagaacctgcccaacgagaaggtgctgcccaagcacagcctgctgtacgagtacttcaccgtgtacaacgagctgaccaaagtgaaatacgtgaccgagggaatgagaaagcccgccttcctgagcggcgagcagaaaaaagccatcgtggacctgctgttcaagaccaaccggaaagtgaccgtgaagcagctgaaagaggactacttcaagaaaatcgagtgcttcgactccgtggaaatctccggcgtggaagatcggttcaacgcctccctgggcacataccacgatctgctgaaaattatcaaggacaaggacttcctggacaatgaggaaaacgaggacattctggaagatatcgtgctgaccctgacactgtttgaggacagagagatgatcgaggaacggctgaaaacctatgcccacctgttcgacgacaaagtgatgaagcagctgaagcggcggagatacaccggctggggcaggctgagccggaagctgatcaacggcatccgggacaagcagtccggcaagacaatcctggatttcctgaagtccgacggcttcgccaacagaaacttcatgcagctgatccacgacgacagcctgacctttaaagaggacatccagaaagcccaggtgtccggccagggcgatagcctgcacgagcacattgccaatctggccggcagccccgccattaagaagggcatcctgcagacagtgaaggtggtggacgagctcgtgaaagtgatgggccggcacaagcccgagaacatcgtgatcgaaatggccagagagaaccagaccacccagaagggacagaagaacagccgcgagagaatgaagcggatcgaagagggcatcaaagagctgggcagccagatcctgaaagaacaccccgtggaaaacacccagctgcagaacgagaagctgtacctgtactacctgcagaatgggcgggatatgtacgtggaccaggaactggacatcaaccggctgtccgactacgatgtggacgctatcgtgcctcagagctttctgaaggacgactccatcgataacaaagtgctgactcggagcgacaagaaccggggcaagagcgacaacgtgccctccgaagaggtcgtgaagaagatgaagaactactggcgccagctgctgaatgccaagctgattacccagaggaagttcgacaatctgaccaaggccgagagaggcggcctgagcgaactggataaggccggcttcatcaagagacagctggtggaaacccggcagatcacaaagcacgtggcacagatcctggactcccggatgaacactaagtacgacgagaacgacaaactgatccgggaagtgaaagtgatcaccctgaagtccaagctggtgtccgatttccggaaggatttccagttttacaaagtgcgcgagatcaacaactaccaccacgcccacgacgcctacctgaacgccgtcgtgggaaccgccctgatcaaaaagtaccctaagctggaaagcgagttcgtgtacggcgactacaaggtgtacgacgtgcggaagatgatcgccaagagcgagcaggaaatcggcaaggctaccgccaagtacttcttctacagcaacatcatgaactttttcaagaccgagattaccctggccaacggcgagatccggaagcggcctctgatcgagacaaacggcgaaacaggcgagatcgtgtgggataagggccgggactttgccaccgtgcggaaagtgctgtctatgccccaagtgaatatcgtgaaaaagaccgaggtgcagacaggcggcttcagcaaagagtctatcctgcccaagaggaacagcgacaagctgatcgccagaaagaaggactgggaccctaagaagtacggcggcttcgacagccccaccgtggcctattctgtgctggtggtggccaaagtggaaaagggcaagtccaagaaactgaagagtgtgaaagagctgctggggatcaccatcatggaaagaagcagcttcgagaagaatcccatcgactttctggaagccaagggctacaaagaagtgaaaaaggacctgatcatcaagctgcctaagtactccctgttcgagctggaaaacggccggaagagaatgctggcctctgccggcgaactgcagaagggaaacgaactggccctgccctccaaatatgtgaacttcctgtacctggccagccactatgagaagctgaagggctcccccgaggataatgagcagaaacagctgtttgtggaacagcacaaacactacctggacgagatcatcgagcagatcagcgagttctccaagagagtgatcctggccgacgctaatctggacaaggtgctgagcgcctacaacaagcacagagacaagcctatcagagagcaggccgagaatatcatccacctgtttaccctgaccaatctgggagcccctgccgccttcaagtactttgacaccaccatcgaccggaagaggtacaccagcaccaaagaggtgctggacgccaccctgatccaccagagcatcaccggcctgtacgagacacggatcgacctgtctcagctgggaggcgacagcggaagtgagaccccaggtacatccgaatcagcaacgcctgaaagcaccggtcggacactggtgaccttcaaggatgtatttgtggacttcaccagggaggagtggaagctgctggacactgctcagcagatcgtgtacagaaatgtgatgctggagaactataagaacctggtttccttgggttatcagcttactaagccagatgtgatcctccggttggagaagggagaagagcccagcgctgattacaaagatgatgacgataaagccccaaaaaagaagagaaaggtaccgaagaaaaaaagaaaggtc

SEQ ID NO: 1508 - protein, 2111 aa, Synthetic construct
MPKKKRKVPKKKRKVNHDQEFDPPKVYPPVPAEKRKPIRVLSLFDGIATGLLVLKDLGIQVDRYIASEVCEDSITVGMVRHQGKIMYVGDVRSVTQKHIQEWGPFDLVIGGSPCNDLSIVNPARKGLYEGTGRLFFEFYRLLHDARPKEGDDRPFFWLFENVVAMGVSDKRDISRFLESNPVMIDAKEVSAAHRARYFWGNLPGMNRPLASTVNDKLELQECLEHGRIAKFSKVRTITTRSNSIKQGKDQHFPVFMNEKEDILWCTEMERVFGFPVHYTDVSNMSRLARQRLLGRSWSVPVIRHLFAPLKEYFACVSSGNSNANSRGPSFSSGLVPLSLRGSHMGPMEIYKTVSAWKRQPVRVLSLFRNIDKVLKSLGFLESGSGSGGGTLKYVEDVTNVVRRDVEKWGPFDLVYGSTQPLGSSCDRCPGWYMFQFHRILQYALPRQESQRPFFWIFMDNLLLTEDDQETTTRFLQTEAVTLQDVRGRDYQNAMRVWSNIPGLKSKHAPLTPKEEEYLQAQVRSRSKLDAPKVDLLVKNCLLPLREYFKYFSQNSLPLGGPSSGAPPPSGGSPAGSPTSTEEGTSESATPESGPGTSTEPSEGSAPGSPAGSPTSTEEGTSTEPSEGSAPGTSTEPSEMDKKYSIGLAIGTNSVGWAVITDEYKVPSKKFKVLGNTDRHSIKKNLIGALLFDSGETAEATRLKRTARRRYTRRKNRICYLQEIFSNEMAKVDDSFFHRLEESFLVEEDKKHERHPIFGNIVDEVAYHEKYPTIYHLRKKLVDSTDKADLRLIYLALAHMIKFRGHFLIEGDLNPDNSDVDKLFIQLVQTYNQLFEENPINASGVDAKAILSARLSKSRRLENLIAQLPGEKKNGLFGNLIALSLGLTPNFKSNFDLAEDAKLQLSKDTYDDDLDNLLAQIGDQYADLFLAAKNLSDAILLSDILRVNTEITKAPLSASMIKRYDEHHQDLTLLKALVRQQLPEKYKEIFFDQSKNGYAGYIDGGASQEEFYKFIKPILEKMDGTEELLVKLNREDLLRKQRTFDNGSIPHQIHLGELHAILRRQEDFYPFLKDNREKIEKILTFRIPYYVGPLARGNSRFAWMTRKSEETITPWNFEEVVDKGASAQSFIERMTNFDKNLPNEKVLPKHSLLYEYFTVYNELTKVKYVTEGMRKPAFLSGEQKKAIVDLLFKTNRKVTVKQLKEDYFKKIECFDSVEISGVEDRFNASLGTYHDLLKIIKDKDFLDNEENEDILEDIVLTLTLFEDREMIEERLKTYAHLFDDKVMKQLKRRRYTGWGRLSRKLINGIRDKQSGKTILDFLKSDGFANRNFMQLIHDDSLTFKEDIQKAQVSGQGDSLHEHIANLAGSPAIKKGILQTVKVVDELVKVMGRHKPENIVIEMARENQTTQKGQKNSRERMKRIEEGIKELGSQILKEHPVENTQLQNEKLYLYYLQNGRDMYVDQELDINRLSDYDVDAIVPQSFLKDDSIDNKVLTRSDKNRGKSDNVPSEEVVKKMKNYWRQLLNAKLITQRKFDNLTKAERGGLSELDKAGFIKRQLVETRQITKHVAQILDSRMNTKYDENDKLIREVKVITLKSKLVSDFRKDFQFYKVREINNYHHAHDAYLNAVVGTALIKKYPKLESEFVYGDYKVYDVRKMIAKSEQEIGKATAKYFFYSNIMNFFKTEITLANGEIRKRPLIETNGETGEIVWDKGRDFATVRKVLSMPQVNIVKKTEVQTGGFSKESILPKRNSDKLIARKKDWDPKKYGGFDSPTVAYSVLVVAKVEKGKSKKLKSVKELLGITIMERSSFEKNPIDFLEAKGYKEVKKDLIIKLPKYSLFELENGRKRMLASAGELQKGNELALPSKYVNFLYLASHYEKLKGSPEDNEQKQLFVEQHKHYLDEIIEQISEFSKRVILADANLDKVLSAYNKHRDKPIREQAENIIHLFTLTNLGAPAAFKYFDTTIDRKRYTSTKEVLDATLIHQSITGLYETRIDLSQLGGDSGSETPGTSESATPESTGRTLVTFKDVFVDFTREEWKLLDTAQQIVYRNVMLENYKNLVSLGYQLTKPDVILRLEKGEEPSADYKDDDDKAPKKKRKVPKKKRKV

SEQ ID NO: 1509 - DNA, 6336 bp, Synthetic construct
  source 1..6336: mol_type = other DNA
atgccaaaaaagaagagaaaggtaccgaagaaaaaaagaaaggtatacaaccatgaccaggaattcgaccccccaaaggtttacccacctgtgccagctgagaagaggaagcccatccgcgtgctgtctctctttgatgggattgctacagggctcctggtgctgaaggacctgggcatccaagtggaccgctacattgcctccgaggtgtgtgaggactccatcacggtgggcatggtgcggcaccagggaaagatcatgtacgtcggggacgtccgcagcgtcacacagaagcatatccaggagtggggcccattcgacctggtgattggaggcagtccctgcaatgacctctccattgtcaaccctgcccgcaagggactttatgagggtactggccgcctcttctttgagttctaccgcctcctgcatgatgcgcggcccaaggagggagatgatcgccccttcttctggctctttgagaatgtggtggccatgggcgttagtgacaagagggacatctcgcgatttcttgagtctaaccccgtgatgattgacgccaaagaagtgtctgctgcacacagggcccgttacttctggggtaaccttcctggcatgaacaggcctttggcatccactgtgaatgataagctggagctgcaagagtgtctggagcacggcagaatagccaagttcagcaaagtgaggaccattaccaccaggtcaaactctataaagcagggcaaagaccagcatttccccgtcttcatgaacgagaaggaggacatcctgtggtgcactgaaatggaaagggtgtttggcttccccgtccactacacagacgtctccaacatgagccgcttggcgaggcagagactgctgggccgatcgtggagcgtgccggtcatccgccacctcttcgctccgctgaaggaatattttgcttgtgtgtctagcggcaatagtaacgctaacagccgcgggccgagcttcagcagcggcctggtgccgttaagcttgcgcggcagccatatgggccctatggagatatacaagacagtgtctgcatggaagagacagccagtgcgggtactgagcctcttcagaaacatcgacaaggtactaaagagtttgggcttcttggaaagcggttctggttctgggggaggaacgctgaagtacgtggaagatgtcacaaatgtcgtgaggagagacgtggagaaatggggcccctttgacctggtgtacggctcgacgcagcccctaggcagctcttgtgatcgctgtcccggctggtacatgttccagttccaccggatcctgcagtatgcgctgcctcgccaggagagtcagcggcccttcttctggatattcatggacaatctgctgctgactgaggatgaccaagagacaactacccgcttccttcagacagaggctgtgaccctccaggatgtccgtggcagagactaccagaatgctatgcgggtgtggagcaacattccagggctgaagagcaagcatgcgcccctgaccccaaaggaagaagagtatctgcaagcccaagtcagaagcaggagcaagctggacgccccgaaagttgacctcctggtgaagaactgccttctcccgctgagagagtacttcaagtatttttctcaaaactcacttcctcttggagggccgagctctggcgcacccccaccaagtggagggtctcctgccgggtccccaacatctactgaagaaggcaccagcgaatccgcaacgcccgagtcaggccctggtacctccacagaaccatctgaaggtagtgcgcctggttccccagctggaagccctacttccaccgaagaaggcacgtcaaccgaaccaagtgaaggatctgcccctgggaccagcactgaaccatctgagatggacaagaagtacagcatcggcctggccatcggcaccaactctgtgggctgggccgtgatcaccgacgagtacaaggtgcccagcaagaaattcaaggtgctgggcaacaccgaccggcacagcatcaagaagaacctgatcggcgccctgctgttcgacagcggagaaacagccgaggccacccggctgaagagaaccgccagaagaagatacaccagacggaagaaccggatctgctatctgcaagagatcttcagcaacgagatggccaaggtggacgacagcttcttccacagactggaagagtccttcctggtggaagaggataagaagcacgagcggcaccccatcttcggcaacatcgtggacgaggtggcctaccacgagaagtaccccaccatctaccacctgagaaagaaactggtggacagcaccgacaaggccgacctgcggctgatctatctggccctggcccacatgatcaagttccggggccacttcctgatcgagggcgacctgaaccccgacaacagcgacgtggacaagctgttcatccagctggtgcagacctacaaccagctgttcgaggaaaaccccatcaacgccagcggcgtggacgccaaggccatcctgtctgccagactgagcaagagcagacggctggaaaatctgatcgcccagctgcccggcgagaagaagaatggcctgttcggcaacctgattgccctgagcctgggcctgacccccaacttcaagagcaacttcgacctggccgaggatgccaaactgcagctgagcaaggacacctacgacgacgacctggacaacctgctggcccagatcggcgaccagtacgccgacctgtttctggccgccaagaacctgtccgacgccatcctgctgagcgacatcctgagagtgaacaccgagatcaccaaggcccccctgagcgcctctatgatcaagagatacgacgagcaccaccaggacctgaccctgctgaaagctctcgtgcggcagcagctgcctgagaagtacaaagagattttcttcgaccagagcaagaacggctacgccggctacatcgatggcggagccagccaggaagagttctacaagttcatcaagcccatcctggaaaagatggacggcaccgaggaactgctcgtgaagctgaacagagaggacctgctgcggaagcagcggaccttcgacaacggcagcatcccccaccagatccacctgggagagctgcacgccattctgcggcggcaggaagatttttacccattcctgaaggacaaccgggaaaagatcgagaagatcctgaccttccgcatcccctactacgtgggccctctggccaggggaaacagcagattcgcctggatgaccagaaagagcgaggaaaccatcaccccctggaacttcgaggaagtggtggacaagggcgccagcgcccagagcttcatcgagcggatgaccaacttcgataagaacctgcccaacgagaaggtgctgcccaagcacagcctgctgtacgagtacttcaccgtgtacaacgagctgaccaaagtgaaatacgtgaccgagggaatgagaaagcccgccttcctgagcggcgagcagaaaaaagccatcgtggacctgctgttcaagaccaaccggaaagtgaccgtgaagcagctgaaagaggactacttcaagaaaatcgagtgcttcgactccgtggaaatctccggcgtggaagatcggttcaacgcctccctgggcacataccacgatctgctgaaaattatcaaggacaaggacttcctggacaatgaggaaaacgaggacattctggaagatatcgtgctgaccctgacactgtttgaggacagagagatgatcgaggaacggctgaaaacctatgcccacctgttcgacgacaaagtgatgaagcagctgaagcggcggagatacaccggctggggcaggctgagccggaagctgatcaacggcatccgggacaagcagtccggcaagacaatcctggatttcctgaagtccgacggcttcgccaacagaaacttcatgcagctgatccacgacgacagcctgacctttaaagaggacatccagaaagcccaggtgtccggccagggcgatagcctgcacgagcacattgccaatctggccggcagccccgccattaagaagggcatcctgcagacagtgaaggtggtggacgagctcgtgaaagtgatgggccggcacaagcccgagaacatcgtgatcgaaatggccagagagaaccagaccacccagaagggacagaagaacagccgcgagagaatgaagcggatcgaagagggcatcaaagagctgggcagccagatcctgaaagaacaccccgtggaaaacacccagctgcagaacgagaagctgtacctgtactacctgcagaatgggcgggatatgtacgtggaccaggaactggacatcaaccggctgtccgactacgatgtggacgctatcgtgcctcagagctttctgaaggacgactccatcgataacaaagtgctgactcggagcgacaagaaccggggcaagagcgacaacgtgccctccgaagaggtcgtgaagaagatgaagaactactggcgccagctgctgaatgccaagctgattacccagaggaagttcgacaatctgaccaaggccgagagaggcggcctgagcgaactggataaggccggcttcatcaagagacagctggtggaaacccggcagatcacaaagcacgtggcacagatcctggactcccggatgaacactaagtacgacgagaacgacaaactgatccgggaagtgaaagtgatcaccctgaagtccaagctggtgtccgatttccggaaggatttccagttttacaaagtgcgcgagatcaacaactaccaccacgcccacgacgcctacctgaacgccgtcgtgggaaccgccctgatcaaaaagtaccctaagctggaaagcgagttcgtgtacggcgactacaaggtgtacgacgtgcggaagatgatcgccaagagcgagcaggaaatcggcaaggctaccgccaagtacttcttctacagcaacatcatgaactttttcaagaccgagattaccctggccaacggcgagatccggaagcggcctctgatcgagacaaacggcgaaacaggcgagatcgtgtgggataagggccgggactttgccaccgtgcggaaagtgctgtctatgccccaagtgaatatcgtgaaaaagaccgaggtgcagacaggcggcttcagcaaagagtctatcctgcccaagaggaacagcgacaagctgatcgccagaaagaaggactgggaccctaagaagtacggcggcttcgacagccccaccgtggcctattctgtgctggtggtggccaaagtggaaaagggcaagtccaagaaactgaagagtgtgaaagagctgctggggatcaccatcatggaaagaagcagcttcgagaagaatcccatcgactttctggaagccaagggctacaaagaagtgaaaaaggacctgatcatcaagctgcctaagtactccctgttcgagctggaaaacggccggaagagaatgctggcctctgccggcgaactgcagaagggaaacgaactggccctgccctccaaatatgtgaacttcctgtacctggccagccactatgagaagctgaagggctcccccgaggataatgagcagaaacagctgtttgtggaacagcacaaacactacctggacgagatcatcgagcagatcagcgagttctccaagagagtgatcctggccgacgctaatctggacaaggtgctgagcgcctacaacaagcacagagacaagcctatcagagagcaggccgagaatatcatccacctgtttaccctgaccaatctgggagcccctgccgccttcaagtactttgacaccaccatcgaccggaagaggtacaccagcaccaaagaggtgctggacgccaccctgatccaccagagcatcaccggcctgtacgagacacggatcgacctgtctcagctgggaggcgacagcggaagtgagaccccaggtacatccgaatcagcaacgcctgaaagcaccggtcggacactggtgaccttcaaggatgtatttgtggacttcaccagggaggagtggaagctgctggacactgctcagcagatcgtgtacagaaatgtgatgctggagaactataagaacctggtttccttgggttatcagcttactaagccagatgtgatcctccggttggagaagggagaagagcccagcgctgattacaaagatgatgacgataaagccccaaaaaagaagagaaaggtaccgaagaaaaaaagaaaggtc

SEQ ID NO: 1510 - protein, 2149 aa, Synthetic construct
MPKKKRKVPKKKRKVNHDQEFDPPKVYPPVPAEKRKPIRVLSLFDGIATGLLVLKDLGIQVDRYIASEVCEDSITVGMVRHQGKIMYVGDVRSVTQKHIQEWGPFDLVIGGSPCNDLSIVNPARKGLYEGTGRLFFEFYRLLHDARPKEGDDRPFFWLFENVVAMGVSDKRDISRFLESNPVMIDAKEVSAAHRARYFWGNLPGMNRPLASTVNDKLELQECLEHGRIAKFSKVRTITTRSNSIKQGKDQHFPVFMNEKEDILWCTEMERVFGFPVHYTDVSNMSRLARQRLLGRSWSVPVIRHLFAPLKEYFACVSSGNSNANSRGPSFSSGLVPLSLRGSHMGPMEIYKTVSAWKRQPVRVLSLFRNIDKVLKSLGFLESGSGSGGGTLKYVEDVTNVVRRDVEKWGPFDLVYGSTQPLGSSCDRCPGWYMFQFHRILQYALPRQESQRPFFWIFMDNLLLTEDDQETTTRFLQTEAVTLQDVRGRDYQNAMRVWSNIPGLKSKHAPLTPKEEEYLQAQVRSRSKLDAPKVDLLVKNCLLPLREYFKYFSQNSLPLGGPSSGAPPPSGGSPAGSPTSTEEGTSESATPESGPGTSTEPSEGSAPGSPAGSPTSTEEGTSTEPSEGSAPGTSTEPSEMDKKYSIGLAIGTNSVGWAVITDEYKVPSKKFKVLGNTDRHSIKKNLIGALLFDSGETAEATRLKRTARRRYTRRKNRICYLQEIFSNEMAKVDDSFFHRLEESFLVEEDKKHERHPIFGNIVDEVAYHEKYPTIYHLRKKLVDSTDKADLRLIYLALAHMIKFRGHFLIEGDLNPDNSDVDKLFIQLVQTYNQLFEENPINASGVDAKAILSARLSKSRRLENLIAQLPGEKKNGLFGNLIALSLGLTPNFKSNFDLAEDAKLQLSKDTYDDDLDNLLAQIGDQYADLFLAAKNLSDAILLSDILRVNTEITKAPLSASMIKRYDEHHQDLTLLKALVRQQLPEKYKEIFFDQSKNGYAGYIDGGASQEEFYKFIKPILEKMDGTEELLVKLNREDLLRKQRTFDNGSIPHQIHLGELHAILRRQEDFYPFLKDNREKIEKILTFRIPYYVGPLARGNSRFAWMTRKSEETITPWNFEEVVDKGASAQSFIERMTNFDKNLPNEKVLPKHSLLYEYFTVYNELTKVKYVTEGMRKPAFLSGEQKKAIVDLLFKTNRKVTVKQLKEDYFKKIECFDSVEISGVEDRFNASLGTYHDLLKIIKDKDFLDNEENEDILEDIVLTLTLFEDREMIEERLKTYAHLFDDKVMKQLKRRRYTGWGRLSRKLINGIRDKQSGKTILDFLKSDGFANRNFMQLIHDDSLTFKEDIQKAQVSGQGDSLHEHIANLAGSPAIKKGILQTVKVVDELVKVMGRHKPENIVIEMARENQTTQKGQKNSRERMKRIEEGIKELGSQILKEHPVENTQLQNEKLYLYYLQNGRDMYVDQELDINRLSDYDVDAIVPQSFLKDDSIDNKVLTRSDKNRGKSDNVPSEEVVKKMKNYWRQLLNAKLITQRKFDNLTKAERGGLSELDKAGFIKRQLVETRQITKHVAQILDSRMNTKYDENDKLIREVKVITLKSKLVSDFRKDFQFYKVREINNYHHAHDAYLNAVVGTALIKKYPKLESEFVYGDYKVYDVRKMIAKSEQEIGKATAKYFFYSNIMNFFKTEITLANGEIRKRPLIETNGETGEIVWDKGRDFATVRKVLSMPQVNIVKKTEVQTGGFSKESILPKRNSDKLIARKKDWDPKKYGGFDSPTVAYSVLVVAKVEKGKSKKLKSVKELLGITIMERSSFEKNPIDFLEAKGYKEVKKDLIIKLPKYSLFELENGRKRMLASAGELQKGNELALPSKYVNFLYLASHYEKLKGSPEDNEQKQLFVEQHKHYLDEIIEQISEFSKRVILADANLDKVLSAYNKHRDKPIREQAENIIHLFTLTNLGAPAAFKYFDTTIDRKRYTSTKEVLDATLIHQSITGLYETRIDLSQLGGDSGSETPGTSESATPESTGMNNSQGRVTFEDVTVNFTQGEWQRLNPEQRNLYRDVMLENYSNLVSVGQGETTKPDVILRLEQGKEPWLEEEEVLGSGRAEKNGDIGGQIWKPKDVKESLSADYKDDDDKAPKKKRKVPKKKRKV

SEQ ID NO: 1511 - DNA, 6450 bp, Synthetic construct
  source 1..6450: mol_type = other DNA
atgccaaaaaagaagagaaaggtaccgaagaaaaaaagaaaggtatacaaccatgaccaggaattcgaccccccaaaggtttacccacctgtgccagctgagaagaggaagcccatccgcgtgctgtctctctttgatgggattgctacagggctcctggtgctgaaggacctgggcatccaagtggaccgctacattgcctccgaggtgtgtgaggactccatcacggtgggcatggtgcggcaccagggaaagatcatgtacgtcggggacgtccgcagcgtcacacagaagcatatccaggagtggggcccattcgacctggtgattggaggcagtccctgcaatgacctctccattgtcaaccctgcccgcaagggactttatgagggtactggccgcctcttctttgagttctaccgcctcctgcatgatgcgcggcccaaggagggagatgatcgccccttcttctggctctttgagaatgtggtggccatgggcgttagtgacaagagggacatctcgcgatttcttgagtctaaccccgtgatgattgacgccaaagaagtgtctgctgcacacagggcccgttacttctggggtaaccttcctggcatgaacaggcctttggcatccactgtgaatgataagctggagctgcaagagtgtctggagcacggcagaatagccaagttcagcaaagtgaggaccattaccaccaggtcaaactctataaagcagggcaaagaccagcatttccccgtcttcatgaacgagaaggaggacatcctgtggtgcactgaaatggaaagggtgtttggcttccccgtccactacacagacgtctccaacatgagccgcttggcgaggcagagactgctgggccgatcgtggagcgtgccggtcatccgccacctcttcgctccgctgaaggaatattttgcttgtgtgtctagcggcaatagtaacgctaacagccgcgggccgagcttcagcagcggcctggtgccgttaagcttgcgcggcagccatatgggccctatggagatatacaagacagtgtctgcatggaagagacagccagtgcgggtactgagcctcttcagaaacatcgacaaggtactaaagagtttgggcttcttggaaagcggttctggttctgggggaggaacgctgaagtacgtggaagatgtcacaaatgtcgtgaggagagacgtggagaaatggggcccctttgacctggtgtacggctcgacgcagcccctaggcagctcttgtgatcgctgtcccggctggtacatgttccagttccaccggatcctgcagtatgcgctgcctcgccaggagagtcagcggcccttcttctggatattcatggacaatctgctgctgactgaggatgaccaagagacaactacccgcttccttcagacagaggctgtgaccctccaggatgtccgtggcagagactaccagaatgctatgcgggtgtggagcaacattccagggctgaagagcaagcatgcgcccctgaccccaaaggaagaagagtatctgcaagcccaagtcagaagcaggagcaagctggacgccccgaaagttgacctcctggtgaagaactgccttctcccgctgagagagtacttcaagtatttttctcaaaactcacttcctcttggagggccgagctctggcgcacccccaccaagtggagggtctcctgccgggtccccaacatctactgaagaaggcaccagcgaatccgcaacgcccgagtcaggccctggtacctccacagaaccatctgaaggtagtgcgcctggttccccagctggaagccctacttccaccgaagaaggcacgtcaaccgaaccaagtgaaggatctgcccctgggaccagcactgaaccatctgagatggacaagaagtacagcatcggcctggccatcggcaccaactctgtgggctgggccgtgatcaccgacgagtacaaggtgcccagcaagaaattcaaggtgctgggcaacaccgaccggcacagcatcaagaagaacctgatcggcgccctgctgttcgacagcggagaaacagccgaggccacccggctgaagagaaccgccagaagaagatacaccagacggaagaaccggatctgctatctgcaagagatcttcagcaacgagatggccaaggtggacgacagcttcttccacagactggaagagtccttcctggtggaagaggataagaagcacgagcggcaccccatcttcggcaacatcgtggacgaggtggcctaccacgagaagtaccccaccatctaccacctgagaaagaaactggtggacagcaccgacaaggccgacctgcggctgatctatctggccctggcccacatgatcaagttccggggccacttcctgatcgagggcgacctgaaccccgacaacagcgacgtggacaagctgttcatccagctggtgcagacctacaaccagctgttcgaggaaaaccccatcaacgccagcggcgtggacgccaaggccatcctgtctgccagactgagcaagagcagacggctggaaaatctgatcgcccagctgcccggcgagaagaagaatggcctgttcggcaacctgattgccctgagcctgggcctgacccccaacttcaagagcaacttcgacctggccgaggatgccaaactgcagctgagcaaggacacctacgacgacgacctggacaacctgctggcccagatcggcgaccagtacgccgacctgtttctggccgccaagaacctgtccgacgccatcctgctgagcgacatcctgagagtgaacaccgagatcaccaaggcccccctgagcgcctctatgatcaagagatacgacgagcaccaccaggacctgaccctgctgaaagctctcgtgcggcagcagctgcctgagaagtacaaagagattttcttcgaccagagcaagaacggctacgccggctacatcgatggcggagccagccaggaagagttctacaagttcatcaagcccatcctggaaaagatggacggcaccgaggaactgctcgtgaagctgaacagagaggacctgctgcggaagcagcggaccttcgacaacggcagcatcccccaccagatccacctgggagagctgcacgccattctgcggcggcaggaagatttttacccattcctgaaggacaaccgggaaaagatcgagaagatcctgaccttccgcatcccctactacgtgggccctctggccaggggaaacagcagattcgcctggatgaccagaaagagcgaggaaaccatcaccccctggaacttcgaggaagtggtggacaagggcgccagcgcccagagcttcatcgagcggatgaccaacttcgataagaacctgcccaacgagaaggtgctgcccaagcacagcctgctgtacgagtacttcaccgtgtacaacgagctgaccaaagtgaaatacgtgaccgagggaatgagaaagcccgccttcctgagcggcgagcagaaaaaagccatcgtggacctgctgttcaagaccaaccggaaagtgaccgtgaagcagctgaaagaggactacttcaagaaaatcgagtgcttcgactccgtggaaatctccggcgtggaagatcggttcaacgcctccctgggcacataccacgatctgctgaaaattatcaaggacaaggacttcctggacaatgaggaaaacgaggacattctggaagatatcgtgctgaccctgacactgtttgaggacagagagatgatcgaggaacggctgaaaacctatgcccacctgttcgacgacaaagtgatgaagcagctgaagcggcggagatacaccggctggggcaggctgagccggaagctgatcaacggcatccgggacaagcagtccggcaagacaatcctggatttcctgaagtccgacggcttcgccaacagaaacttcatgcagctgatccacgacgacagcctgacctttaaagaggacatccagaaagcccaggtgtccggccagggcgatagcctgcacgagcacattgccaatctggccggcagccccgccattaagaagggcatcctgcagacagtgaaggtggtggacgagctcgtgaaagtgatgggccggcacaagcccgagaacatcgtgatcgaaatggccagagagaaccagaccacccagaagggacagaagaacagccgcgagagaatgaagcggatcgaagagggcatcaaagagctgggcagccagatcctgaaagaacaccccgtggaaaacacccagctgcagaacgagaagctgtacctgtactacctgcagaatgggcgggatatgtacgtggaccaggaactggacatcaaccggctgtccgactacgatgtggacgctatcgtgcctcagagctttctgaaggacgactccatcgataacaaagtgctgactcggagcgacaagaaccggggcaagagcgacaacgtgccctccgaagaggtcgtgaagaagatgaagaactactggcgccagctgctgaatgccaagctgattacccagaggaagttcgacaatctgaccaaggccgagagaggcggcctgagcgaactggataaggccggcttcatcaagagacagctggtggaaacccggcagatcacaaagcacgtggcacagatcctggactcccggatgaacactaagtacgacgagaacgacaaactgatccgggaagtgaaagtgatcaccctgaagtccaagctggtgtccgatttccggaaggatttccagttttacaaagtgcgcgagatcaacaactaccaccacgcccacgacgcctacctgaacgccgtcgtgggaaccgccctgatcaaaaagtaccctaagctggaaagcgagttcgtgtacggcgactacaaggtgtacgacgtgcggaagatgatcgccaagagcgagcaggaaatcggcaaggctaccgccaagtacttcttctacagcaacatcatgaactttttcaagaccgagattaccctggccaacggcgagatccggaagcggcctctgatcgagacaaacggcgaaacaggcgagatcgtgtgggataagggccgggactttgccaccgtgcggaaagtgctgtctatgccccaagtgaatatcgtgaaaaagaccgaggtgcagacaggcggcttcagcaaagagtctatcctgcccaagaggaacagcgacaagctgatcgccagaaagaaggactgggaccctaagaagtacggcggcttcgacagccccaccgtggcctattctgtgctggtggtggccaaagtggaaaagggcaagtccaagaaactgaagagtgtgaaagagctgctggggatcaccatcatggaaagaagcagcttcgagaagaatcccatcgactttctggaagccaagggctacaaagaagtgaaaaaggacctgatcatcaagctgcctaagtactccctgttcgagctggaaaacggccggaagagaatgctggcctctgccggcgaactgcagaagggaaacgaactggccctgccctccaaatatgtgaacttcctgtacctggccagccactatgagaagctgaagggctcccccgaggataatgagcagaaacagctgtttgtggaacagcacaaacactacctggacgagatcatcgagcagatcagcgagttctccaagagagtgatcctggccgacgctaatctggacaaggtgctgagcgcctacaacaagcacagagacaagcctatcagagagcaggccgagaatatcatccacctgtttaccctgaccaatctgggagcccctgccgccttcaagtactttgacaccaccatcgaccggaagaggtacaccagcaccaaagaggtgctggacgccaccctgatccaccagagcatcaccggcctgtacgagacacggatcgacctgtctcagctgggaggcgacagcggaagtgagaccccaggtacatccgaatcagcaacgcctgaaagcaccggtatgaacaattcacaggggagagtgacattcgaagacgtgaccgtgaacttcacccagggagaatggcagcgcttgaacccagaacaaaggaacctctatcgggacgtgatgctggaaaactactcaaatttggtgagcgttgggcagggtgagaccactaagcctgacgtgatcctgagattggaacagggcaaggagccttggctcgaggaagaggaagtcctgggctcagggagggccgagaaaaacggtgatataggaggccagatatggaagcctaaggacgtcaaggagagcctgagcgctgattacaaagatgatgacgataaagccccaaaaaagaagagaaaggtaccgaagaaaaaaagaaaggtc

SEQ ID NO: 1512 - protein, 2129 aa, Synthetic construct
MPKKKRKVPKKKRKVNHDQEFDPPKVYPPVPAEKRKPIRVLSLFDGIATGLLVLKDLGIQVDRYIASEVCEDSITVGMVRHQGKIMYVGDVRSVTQKHIQEWGPFDLVIGGSPCNDLSIVNPARKGLYEGTGRLFFEFYRLLHDARPKEGDDRPFFWLFENVVAMGVSDKRDISRFLESNPVMIDAKEVSAAHRARYFWGNLPGMNRPLASTVNDKLELQECLEHGRIAKFSKVRTITTRSNSIKQGKDQHFPVFMNEKEDILWCTEMERVFGFPVHYTDVSNMSRLARQRLLGRSWSVPVIRHLFAPLKEYFACVSSGNSNANSRGPSFSSGLVPLSLRGSHMGPMEIYKTVSAWKRQPVRVLSLFRNIDKVLKSLGFLESGSGSGGGTLKYVEDVTNVVRRDVEKWGPFDLVYGSTQPLGSSCDRCPGWYMFQFHRILQYALPRQESQRPFFWIFMDNLLLTEDDQETTTRFLQTEAVTLQDVRGRDYQNAMRVWSNIPGLKSKHAPLTPKEEEYLQAQVRSRSKLDAPKVDLLVKNCLLPLREYFKYFSQNSLPLGGPSSGAPPPSGGSPAGSPTSTEEGTSESATPESGPGTSTEPSEGSAPGSPAGSPTSTEEGTSTEPSEGSAPGTSTEPSEMDKKYSIGLAIGTNSVGWAVITDEYKVPSKKFKVLGNTDRHSIKKNLIGALLFDSGETAEATRLKRTARRRYTRRKNRICYLQEIFSNEMAKVDDSFFHRLEESFLVEEDKKHERHPIFGNIVDEVAYHEKYPTIYHLRKKLVDSTDKADLRLIYLALAHMIKFRGHFLIEGDLNPDNSDVDKLFIQLVQTYNQLFEENPINASGVDAKAILSARLSKSRRLENLIAQLPGEKKNGLFGNLIALSLGLTPNFKSNFDLAEDAKLQLSKDTYDDDLDNLLAQIGDQYADLFLAAKNLSDAILLSDILRVNTEITKAPLSASMIKRYDEHHQDLTLLKALVRQQLPEKYKEIFFDQSKNGYAGYIDGGASQEEFYKFIKPILEKMDGTEELLVKLNREDLLRKQRTFDNGSIPHQIHLGELHAILRRQEDFYPFLKDNREKIEKILTFRIPYYVGPLARGNSRFAWMTRKSEETITPWNFEEVVDKGASAQSFIERMTNFDKNLPNEKVLPKHSLLYEYFTVYNELTKVKYVTEGMRKPAFLSGEQKKAIVDLLFKTNRKVTVKQLKEDYFKKIECFDSVEISGVEDRFNASLGTYHDLLKIIKDKDFLDNEENEDILEDIVLTLTLFEDREMIEERLKTYAHLFDDKVMKQLKRRRYTGWGRLSRKLINGIRDKQSGKTILDFLKSDGFANRNFMQLIHDDSLTFKEDIQKAQVSGQGDSLHEHIANLAGSPAIKKGILQTVKVVDELVKVMGRHKPENIVIEMARENQTTQKGQKNSRERMKRIEEGIKELGSQILKEHPVENTQLQNEKLYLYYLQNGRDMYVDQELDINRLSDYDVDAIVPQSFLKDDSIDNKVLTRSDKNRGKSDNVPSEEVVKKMKNYWRQLLNAKLITQRKFDNLTKAERGGLSELDKAGFIKRQLVETRQITKHVAQILDSRMNTKYDENDKLIREVKVITLKSKLVSDFRKDFQFYKVREINNYHHAHDAYLNAVVGTALIKKYPKLESEFVYGDYKVYDVRKMIAKSEQEIGKATAKYFFYSNIMNFFKTEITLANGEIRKRPLIETNGETGEIVWDKGRDFATVRKVLSMPQVNIVKKTEVQTGGFSKESILPKRNSDKLIARKKDWDPKKYGGFDSPTVAYSVLVVAKVEKGKSKKLKSVKELLGITIMERSSFEKNPIDFLEAKGYKEVKKDLIIKLPKYSLFELENGRKRMLASAGELQKGNELALPSKYVNFLYLASHYEKLKGSPEDNEQKQLFVEQHKHYLDEIIEQISEFSKRVILADANLDKVLSAYNKHRDKPIREQAENIIHLFTLTNLGAPAAFKYFDTTIDRKRYTSTKEVLDATLIHQSITGLYETRIDLSQLGGDSGSETPGTSESATPESTGNKKLEAVGTGIEPKAMSQGLVTFGDVAVDFSQEEWEWLNPIQRNLYRKVMLENYRNLASLGLCVSKPDVISSLEQGKEPWSADYKDDDDKAPKKKRKVPKKKRKV

SEQ ID NO: 1513 - DNA, 6390 bp, Synthetic construct
  source 1..6390: mol_type = other DNA
atgccaaaaaagaagagaaaggtaccgaagaaaaaaagaaaggtatacaaccatgaccaggaattcgaccccccaaaggtttacccacctgtgccagctgagaagaggaagcccatccgcgtgctgtctctctttgatgggattgctacagggctcctggtgctgaaggacctgggcatccaagtggaccgctacattgcctccgaggtgtgtgaggactccatcacggtgggcatggtgcggcaccagggaaagatcatgtacgtcggggacgtccgcagcgtcacacagaagcatatccaggagtggggcccattcgacctggtgattggaggcagtccctgcaatgacctctccattgtcaaccctgcccgcaagggactttatgagggtactggccgcctcttctttgagttctaccgcctcctgcatgatgcgcggcccaaggagggagatgatcgccccttcttctggctctttgagaatgtggtggccatgggcgttagtgacaagagggacatctcgcgatttcttgagtctaaccccgtgatgattgacgccaaagaagtgtctgctgcacacagggcccgttacttctggggtaaccttcctggcatgaacaggcctttggcatccactgtgaatgataagctggagctgcaagagtgtctggagcacggcagaatagccaagttcagcaaagtgaggaccattaccaccaggtcaaactctataaagcagggcaaagaccagcatttccccgtcttcatgaacgagaaggaggacatcctgtggtgcactgaaatggaaagggtgtttggcttccccgtccactacacagacgtctccaacatgagccgcttggcgaggcagagactgctgggccgatcgtggagcgtgccggtcatccgccacctcttcgctccgctgaaggaatattttgcttgtgtgtctagcggcaatagtaacgctaacagccgcgggccgagcttcagcagcggcctggtgccgttaagcttgcgcggcagccatatgggccctatggagatatacaagacagtgtctgcatggaagagacagccagtgcgggtactgagcctcttcagaaacatcgacaaggtactaaagagtttgggcttcttggaaagcggttctggttctgggggaggaacgctgaagtacgtggaagatgtcacaaatgtcgtgaggagagacgtggagaaatggggcccctttgacctggtgtacggctcgacgcagcccctaggcagctcttgtgatcgctgtcccggctggtacatgttccagttccaccggatcctgcagtatgcgctgcctcgccaggagagtcagcggcccttcttctggatattcatggacaatctgctgctgactgaggatgaccaagagacaactacccgcttccttcagacagaggctgtgaccctccaggatgtccgtggcagagactaccagaatgctatgcgggtgtggagcaacattccagggctgaagagcaagcatgcgcccctgaccccaaaggaagaagagtatctgcaagcccaagtcagaagcaggagcaagctggacgccccgaaagttgacctcctggtgaagaactgccttctcccgctgagagagtacttcaagtatttttctcaaaactcacttcctcttggagggccgagctctggcgcacccccaccaagtggagggtctcctgccgggtccccaacatctactgaagaaggcaccagcgaatccgcaacgcccgagtcaggccctggtacctccacagaaccatctgaaggtagtgcgcctggttccccagctggaagccctacttccaccgaagaaggcacgtcaaccgaaccaagtgaaggatctgcccctgggaccagcactgaaccatctgagatggacaagaagtacagcatcggcctggccatcggcaccaactctgtgggctgggccgtgatcaccgacgagtacaaggtgcccagcaagaaattcaaggtgctgggcaacaccgaccggcacagcatcaagaagaacctgatcggcgccctgctgttcgacagcggagaaacagccgaggccacccggctgaagagaaccgccagaagaagatacaccagacggaagaaccggatctgctatctgcaagagatcttcagcaacgagatggccaaggtggacgacagcttcttccacagactggaagagtccttcctggtggaagaggataagaagcacgagcggcaccccatcttcggcaacatcgtggacgaggtggcctaccacgagaagtaccccaccatctaccacctgagaaagaaactggtggacagcaccgacaaggccgacctgcggctgatctatctggccctggcccacatgatcaagttccggggccacttcctgatcgagggcgacctgaaccccgacaacagcgacgtggacaagctgttcatccagctggtgcagacctacaaccagctgttcgaggaaaaccccatcaacgccagcggcgtggacgccaaggccatcctgtctgccagactgagcaagagcagacggctggaaaatctgatcgcccagctgcccggcgagaagaagaatggcctgttcggcaacctgattgccctgagcctgggcctgacccccaacttcaagagcaacttcgacctggccgaggatgccaaactgcagctgagcaaggacacctacgacgacgacctggacaacctgctggcccagatcggcgaccagtacgccgacctgtttctggccgccaagaacctgtccgacgccatcctgctgagcgacatcctgagagtgaacaccgagatcaccaaggcccccctgagcgcctctatgatcaagagatacgacgagcaccaccaggacctgaccctgctgaaagctctcgtgcggcagcagctgcctgagaagtacaaagagattttcttcgaccagagcaagaacggctacgccggctacatcgatggcggagccagccaggaagagttctacaagttcatcaagcccatcctggaaaagatggacggcaccgaggaactgctcgtgaagctgaacagagaggacctgctgcggaagcagcggaccttcgacaacggcagcatcccccaccagatccacctgggagagctgcacgccattctgcggcggcaggaagatttttacccattcctgaaggacaaccgggaaaagatcgagaagatcctgaccttccgcatcccctactacgtgggccctctggccaggggaaacagcagattcgcctggatgaccagaaagagcgaggaaaccatcaccccctggaacttcgaggaagtggtggacaagggcgccagcgcccagagcttcatcgagcggatgaccaacttcgataagaacctgcccaacgagaaggtgctgcccaagcacagcctgctgtacgagtacttcaccgtgtacaacgagctgaccaaagtgaaatacgtgaccgagggaatgagaaagcccgccttcctgagcggcgagcagaaaaaagccatcgtggacctgctgttcaagaccaaccggaaagtgaccgtgaagcagctgaaagaggactacttcaagaaaatcgagtgcttcgactccgtggaaatctccggcgtggaagatcggttcaacgcctccctgggcacataccacgatctgctgaaaattatcaaggacaaggacttcctggacaatgaggaaaacgaggacattctggaagatatcgtgctgaccctgacactgtttgaggacagagagatgatcgaggaacggctgaaaacctatgcccacctgttcgacgacaaagtgatgaagcagctgaagcggcggagatacaccggctggggcaggctgagccggaagctgatcaacggcatccgggacaagcagtccggcaagacaatcctggatttcctgaagtccgacggcttcgccaacagaaacttcatgcagctgatccacgacgacagcctgacctttaaagaggacatccagaaagcccaggtgtccggccagggcgatagcctgcacgagcacattgccaatctggccggcagccccgccattaagaagggcatcctgcagacagtgaaggtggtggacgagctcgtgaaagtgatgggccggcacaagcccgagaacatcgtgatcgaaatggccagagagaaccagaccacccagaagggacagaagaacagccgcgagagaatgaagcggatcgaagagggcatcaaagagctgggcagccagatcctgaaagaacaccccgtggaaaacacccagctgcagaacgagaagctgtacctgtactacctgcagaatgggcgggatatgtacgtggaccaggaactggacatcaaccggctgtccgactacgatgtggacgctatcgtgcctcagagctttctgaaggacgactccatcgataacaaagtgctgactcggagcgacaagaaccggggcaagagcgacaacgtgccctccgaagaggtcgtgaagaagatgaagaactactggcgccagctgctgaatgccaagctgattacccagaggaagttcgacaatctgaccaaggccgagagaggcggcctgagcgaactggataaggccggcttcatcaagagacagctggtggaaacccggcagatcacaaagcacgtggcacagatcctggactcccggatgaacactaagtacgacgagaacgacaaactgatccgggaagtgaaagtgatcaccctgaagtccaagctggtgtccgatttccggaaggatttccagttttacaaagtgcgcgagatcaacaactaccaccacgcccacgacgcctacctgaacgccgtcgtgggaaccgccctgatcaaaaagtaccctaagctggaaagcgagttcgtgtacggcgactacaaggtgtacgacgtgcggaagatgatcgccaagagcgagcaggaaatcggcaaggctaccgccaagtacttcttctacagcaacatcatgaactttttcaagaccgagattaccctggccaacggcgagatccggaagcggcctctgatcgagacaaacggcgaaacaggcgagatcgtgtgggataagggccgggactttgccaccgtgcggaaagtgctgtctatgccccaagtgaatatcgtgaaaaagaccgaggtgcagacaggcggcttcagcaaagagtctatcctgcccaagaggaacagcgacaagctgatcgccagaaagaaggactgggaccctaagaagtacggcggcttcgacagccccaccgtggcctattctgtgctggtggtggccaaagtggaaaagggcaagtccaagaaactgaagagtgtgaaagagctgctggggatcaccatcatggaaagaagcagcttcgagaagaatcccatcgactttctggaagccaagggctacaaagaagtgaaaaaggacctgatcatcaagctgcctaagtactccctgttcgagctggaaaacggccggaagagaatgctggcctctgccggcgaactgcagaagggaaacgaactggccctgccctccaaatatgtgaacttcctgtacctggccagccactatgagaagctgaagggctcccccgaggataatgagcagaaacagctgtttgtggaacagcacaaacactacctggacgagatcatcgagcagatcagcgagttctccaagagagtgatcctggccgacgctaatctggacaaggtgctgagcgcctacaacaagcacagagacaagcctatcagagagcaggccgagaatatcatccacctgtttaccctgaccaatctgggagcccctgccgccttcaagtactttgacaccaccatcgaccggaagaggtacaccagcaccaaagaggtgctggacgccaccctgatccaccagagcatcaccggcctgtacgagacacggatcgacctgtctcagctgggaggcgacagcggaagtgagaccccaggtacatccgaatcagcaacgcctgaaagcaccggtaacaaaaagcttgaggccgtcggaaccggaatcgaaccaaaagcaatgtcccagggtttggtgacatttggcgacgtggctgtcgatttttcccaggaagagtgggagtggctcaatcctatccagaggaacttgtaccggaaggtgatgctggagaattatagaaatttggcatcactggggttgtgcgttagcaaaccagatgttatatcttccctggaacagggaaaggagccctggagcgctgattacaaagatgatgacgataaagccccaaaaaagaagagaaaggtaccgaagaaaaaaagaaaggtc

SEQ ID NO: 1514 - protein, 2298 aa, Synthetic construct; identical to SEQ ID NO: 660

SEQ ID NO: 1515 - DNA, 6897 bp, Synthetic construct
  source 1..6897: mol_type = other DNA
atgggtaccatgccaaaaaagaagagaaaggtaccgaagaaaaaaagaaaggtatacaatcacgatcaggagttcgacccccctaaggtgtacccaccagtgcctgcagagaagaggaagccaatccgggtgctgagcctgtttgatggcatcgccaccggcctgctggtgctgaaggatctgggcatccaggtggaccggtacatcgcctccgaggtgtgcgaggattctatcaccgtgggcatggtgcgccaccagggcaagatcatgtatgtgggcgacgtgcggtccgtgacacagaagcacatccaggagtggggcccattcgatctggtgatcggcggcagcccctgtaatgacctgtccatcgtgaaccctgcaaggaagggactgtacgagggaaccggccggctgttctttgagttttatagactgctgcacgacgccaggcctaaggagggcgacgatagaccattcttttggctgttcgagaatgtggtggctatgggcgtgagcgataagagggacatctccaggtttctggagtctaaccccgtgatgatcgatgcaaaggaggtgtccgccgcacacagagccaggtatttctggggcaatctgccaggaatgaacaggccactggcaagcaccgtgaatgacaagctggagctgcaggagtgcctggagcacggaaggatcgccaagttttccaaggtgcgcacaatcaccacacggagcaattccatcaagcagggcaaggatcagcacttccccgtgttcatgaacgagaaggaggacatcctgtggtgtaccgagatggagagagtgttcggctttccagtgcactacacagacgtgtctaacatgagcaggctggcaaggcagcggctgctgggcagatcttggagcgtgcccgtgatcaggcacctgttcgcccctctgaaggagtattttgcctgcgtgagcagcggcaactccaatgccaacagccggggcccctctttcagctccggattggtgcctctgagcctgaggggctcccacatggcagcaatccccgccctggaccccgaggccgagcctagcatggacgtgatcctggtgggctctagcgagctgtcctctagcgtgtctccaggaaccggaagggatctgatcgcatacgaggtgaaggccaatcagcggaacatcgaggacatctgtatctgctgtggcagcctgcaggtgcacacacagcacccactgttcgagggaggaatctgcgcaccctgtaaggataagttcctggacgccctgtttctgtacgacgatgacggctaccagtcctattgctctatctgctgttccggcgagaccctgctgatctgcggcaatccagattgtacaaggtgctattgttttgagtgcgtggactctctggtgggaccaggcaccagcggaaaggtgcacgccatgtccaactgggtgtgctacctgtgcctgccatcctctcgcagcggactgctgcagcggagaaggaagtggagatcccagctgaaggccttctatgatagggagtctgagaaccccctggagatgtttgagaccgtgccagtgtggcgccggcagcccgtgagggtgctgagcctgttcgaggatatcaagaaggagctgacatccctgggctttctggagtccggctctgaccccggacagctgaagcacgtggtggatgtgaccgacacagtgcggaaggatgtggaggagtggggccctttcgacctggtgtacggagcaacccctccactgggacacacatgcgacagacccccttcttggtacctgttccagtttcaccgcctgctgcagtatgcaaggccaaagccaggcagccctagaccattcttttggatgttcgtggataatctggtgctgaacaaggaggatctggacgtggccagcaggtttctggagatggagccagtgaccatcccagacgtgcacggcggctccctgcagaatgccgtgcgcgtgtggtctaacatccctgccatcagaagcaggcactgggcactggtgagcgaggaggagctgtccctgctggcccagaataagcagagcagcaagctggccgccaagtggcctacaaagctggtgaagaactgcttcctgccactgcgggagtacttcaagtatttttccaccgagctgacatctagcctgggaggaccctcctctggcgccccaccacctagcggcggctcccctgccggctctccaaccagcacagaggagggcaccagcgagtccgccacaccagagtctggacctggcaccagcacagagccatccgagggctctgccccaggctctcctgcaggcagccctacctccaccgaagagggcaccagcacagagccttctgagggcagcgccccaggcacctctacagagccaagcgagctcgaggacaagaagtacagcatcggcctggccatcggcaccaactctgtgggctgggccgtgatcaccgacgagtacaaggtgcccagcaagaaattcaaggtgctgggcaacaccgaccggcacagcatcaagaagaacctgatcggagccctgctgttcgacagcggcgaaacagccgaggccacccggctgaagagaaccgccagaagaagatacaccagacggaagaaccggatctgctatctgcaagagatcttcagcaacgagatggccaaggtggacgacagcttcttccacagactggaagagtccttcctggtggaagaggataagaagcacgagcggcaccccatcttcggcaacatcgtggacgaggtggcctaccacgagaagtaccccaccatctaccacctgagaaagaaactggtggacagcaccgacaaggccgacctgcggctgatctatctggccctggcccacatgatcaagttccggggccacttcctgatcgagggcgacctgaaccccgacaacagcgacgtggacaagctgttcatccagctggtgcagacctacaaccagctgttcgaggaaaaccccatcaacgccagcggcgtggacgccaaggccatcctgtctgccagactgagcaagagcagacggctggaaaatctgatcgcccagctgcccggcgagaagaagaatggcctgttcggcaacctgattgccctgagcctgggcctgacccccaacttcaagagcaacttcgacctggccgaggatgccaaactgcagctgagcaaggacacctacgacgacgacctggacaacctgctggcccagatcggcgaccagtacgccgacctgtttctggccgccaagaacctgtccgacgccatcctgctgagcgacatcctgagagtgaacaccgagatcaccaaggcccccctgagcgcctctatgatcaagagatacgacgagcaccaccaggacctgaccctgctgaaagctctcgtgcggcagcagctgcctgagaagtacaaagagattttcttcgaccagagcaagaacggctacgccggctacattgacggcggagccagccaggaagagttctacaagttcatcaagcccatcctggaaaagatggacggcaccgaggaactgctcgtgaagctgaacagagaggacctgctgcggaagcagcggaccttcgacaacggcagcatcccccaccagatccacctgggagagctgcacgccattctgcggcggcaggaagatttttacccattcctgaaggacaaccgggaaaagatcgagaagatcctgaccttccgcatcccctactacgtgggccctctggccaggggaaacagcagattcgcctggatgaccagaaagagcgaggaaaccatcaccccctggaacttcgaggaagtggtggacaagggcgcttccgcccagagcttcatcgagcggatgaccaacttcgataagaacctgcccaacgagaaggtgctgcccaagcacagcctgctgtacgagtacttcaccgtgtataacgagctgaccaaagtgaaatacgtgaccgagggaatgagaaagcccgccttcctgagcggcgagcagaaaaaggccatcgtggacctgctgttcaagaccaaccggaaagtgaccgtgaagcagctgaaagaggactacttcaagaaaatcgagtgcttcgactccgtggaaatctccggcgtggaagatcggttcaacgcctccctgggcacataccacgatctgctgaaaattatcaaggacaaggacttcctggacaatgaggaaaacgaggacattctggaagatatcgtgctgaccctgacactgtttgaggacagagagatgatcgaggaacggctgaaaacctatgcccacctgttcgacgacaaagtgatgaagcagctgaagcggcggagatacaccggctggggcaggctgagccggaagctgatcaacggcatccgggacaagcagtccggcaagacaatcctggatttcctgaagtccgacggcttcgccaacagaaacttcatgcagctgatccacgacgacagcctgacctttaaagaggacatccagaaagcccaggtgtccggccagggcgatagcctgcacgagcacattgccaatctggccggcagccccgccattaagaagggcatcctgcagacagtgaaggtggtggacgagctcgtgaaagtgatgggccggcacaagcccgagaacatcgtgatcgaaatggccagagagaaccagaccacccagaagggacagaagaacagccgcgagagaatgaagcggatcgaagagggcatcaaagagctgggcagccagatcctgaaagaacaccccgtggaaaacacccagctgcagaacgagaagctgtacctgtactacctgcagaatgggcgggatatgtacgtggaccaggaactggacatcaaccggctgtccgactacgatgtggacgccatcgtgcctcagagctttctgaaggacgactccatcgacaacaaggtgctgaccagaagcgacaagaaccggggcaagagcgacaacgtgccctccgaagaggtcgtgaagaagatgaagaactactggcggcagctgctgaacgccaagctgattacccagagaaagttcgacaatctgaccaaggccgagagaggcggcctgagcgaactggataaggccggcttcatcaagagacagctggtggaaacccggcagatcacaaagcacgtggcacagatcctggactcccggatgaacactaagtacgacgagaatgacaagctgatccgggaagtgaaagtgatcaccctgaagtccaagctggtgtccgatttccggaaggatttccagttttacaaagtgcgcgagatcaacaactaccaccacgcccacgacgcctacctgaacgccgtcgtgggaaccgccctgatcaaaaagtaccctaagctggaaagcgagttcgtgtacggcgactacaaggtgtacgacgtgcggaagatgatcgccaagagcgagcaggaaatcggcaaggctaccgccaagtacttcttctacagcaacatcatgaactttttcaagaccgagattaccctggccaacggcgagatccggaagcggcctctgatcgagacaaacggcgaaaccggggagatcgtgtgggataagggccgggattttgccaccgtgcggaaagtgctgagcatgccccaagtgaatatcgtgaaaaagaccgaggtgcagacaggcggcttcagcaaagagtctatcctgcccaagaggaacagcgataagctgatcgccagaaagaaggactgggaccctaagaagtacggcggcttcgacagccccaccgtggcctattctgtgctggtggtggccaaagtggaaaagggcaagtccaagaaactgaagagtgtgaaagagctgctggggatcaccatcatggaaagaagcagcttcgagaagaatcccatcgactttctggaagccaagggctacaaagaagtgaaaaaggacctgatcatcaagctgcctaagtactccctgttcgagctggaaaacggccggaagagaatgctggcctctgccggcgaactgcagaagggaaacgaactggccctgccctccaaatatgtgaacttcctgtacctggccagccactatgagaagctgaagggctcccccgaggataatgagcagaaacagctgtttgtggaacagcacaagcactacctggacgagatcatcgagcagatcagcgagttctccaagagagtgatcctggccgacgctaatctggacaaagtgctgtccgcctacaacaagcaccgggataagcccatcagagagcaggccgagaatatcatccacctgtttaccctgaccaatctgggagcccctgccgccttcaagtactttgacaccaccatcgaccggaagaggtacaccagcaccaaagaggtgctggacgccaccctgatccaccagagcatcaccggcctgtacgagacacggatcgacctgtctcagctgggaggcgacagccccaagaagaagagaaaggtgggagtcgacggatccagcggctccgagaccccaggcacatctgagagcgccacccctgagtcccggaccctggtgaccttcaaggatgtatttgtggacttcaccagggaggagtggaagctgctggacactgctcagcagatcgtgtacagaaatgtgatgctggagaactataagaacctggtttccttgggttatcagcttactaagccagatgtgatcctccggttggagaagggagaagagcccagcgctgattacaaagatgatgacgataaagccccaaaaaagaagagaaaggtaccgaagaaaaaaagaaaggtctga

SEQ ID NO: 1516 - protein, 2318 aa, Synthetic construct; identical to SEQ ID NO: 661

SEQ ID NO: 1517 - DNA, 6957 bp, Synthetic construct
  source 1..6957: mol_type = other DNA
atgggtaccatgccaaaaaagaagagaaaggtaccgaagaaaaaaagaaaggtatacaatcacgatcaggagttcgacccccctaaggtgtacccaccagtgcctgcagagaagaggaagccaatccgggtgctgagcctgtttgatggcatcgccaccggcctgctggtgctgaaggatctgggcatccaggtggaccggtacatcgcctccgaggtgtgcgaggattctatcaccgtgggcatggtgcgccaccagggcaagatcatgtatgtgggcgacgtgcggtccgtgacacagaagcacatccaggagtggggcccattcgatctggtgatcggcggcagcccctgtaatgacctgtccatcgtgaaccctgcaaggaagggactgtacgagggaaccggccggctgttctttgagttttatagactgctgcacgacgccaggcctaaggagggcgacgatagaccattcttttggctgttcgagaatgtggtggctatgggcgtgagcgataagagggacatctccaggtttctggagtctaaccccgtgatgatcgatgcaaaggaggtgtccgccgcacacagagccaggtatttctggggcaatctgccaggaatgaacaggccactggcaagcaccgtgaatgacaagctggagctgcaggagtgcctggagcacggaaggatcgccaagttttccaaggtgcgcacaatcaccacacggagcaattccatcaagcagggcaaggatcagcacttccccgtgttcatgaacgagaaggaggacatcctgtggtgtaccgagatggagagagtgttcggctttccagtgcactacacagacgtgtctaacatgagcaggctggcaaggcagcggctgctgggcagatcttggagcgtgcccgtgatcaggcacctgttcgcccctctgaaggagtattttgcctgcgtgagcagcggcaactccaatgccaacagccggggcccctctttcagctccggattggtgcctctgagcctgaggggctcccacatggcagcaatccccgccctggaccccgaggccgagcctagcatggacgtgatcctggtgggctctagcgagctgtcctctagcgtgtctccaggaaccggaagggatctgatcgcatacgaggtgaaggccaatcagcggaacatcgaggacatctgtatctgctgtggcagcctgcaggtgcacacacagcacccactgttcgagggaggaatctgcgcaccctgtaaggataagttcctggacgccctgtttctgtacgacgatgacggctaccagtcctattgctctatctgctgttccggcgagaccctgctgatctgcggcaatccagattgtacaaggtgctattgttttgagtgcgtggactctctggtgggaccaggcaccagcggaaaggtgcacgccatgtccaactgggtgtgctacctgtgcctgccatcctctcgcagcggactgctgcagcggagaaggaagtggagatcccagctgaaggccttctatgatagggagtctgagaaccccctggagatgtttgagaccgtgccagtgtggcgccggcagcccgtgagggtgctgagcctgttcgaggatatcaagaaggagctgacatccctgggctttctggagtccggctctgaccccggacagctgaagcacgtggtggatgtgaccgacacagtgcggaaggatgtggaggagtggggccctttcgacctggtgtacggagcaacccctccactgggacacacatgcgacagacccccttcttggtacctgttccagtttcaccgcctgctgcagtatgcaaggccaaagccaggcagccctagaccattcttttggatgttcgtggataatctggtgctgaacaaggaggatctggacgtggccagcaggtttctggagatggagccagtgaccatcccagacgtgcacggcggctccctgcagaatgccgtgcgcgtgtggtctaacatccctgccatcagaagcaggcactgggcactggtgagcgaggaggagctgtccctgctggcccagaataagcagagcagcaagctggccgccaagtggcctacaaagctggtgaagaactgcttcctgccactgcgggagtacttcaagtatttttccaccgagctgacatctagcctgggaggaccctcctctggcgccccaccacctagcggcggctcccctgccggctctccaaccagcacagaggagggcaccagcgagtccgccacaccagagtctggacctggcaccagcacagagccatccgagggctctgccccgggctctcctgcaggcagccctacctccaccgaagagggcaccagcacagagccttctgagggcagcgccccaggcacctctacagagccaagcgagctcgaggacaagaagtacagcatcggcctggccatcggcaccaactctgtgggctgggccgtgatcaccgacgagtacaaggtgcccagcaagaaattcaaggtgctgggcaacaccgaccggcacagcatcaagaagaacctgatcggagccctgctgttcgacagcggcgaaacagccgaggccacccggctgaagagaaccgccagaagaagatacaccagacggaagaaccggatctgctatctgcaagagatcttcagcaacgagatggccaaggtggacgacagcttcttccacagactggaagagtccttcctggtggaagaggataagaagcacgagcggcaccccatcttcggcaacatcgtggacgaggtggcctaccacgagaagtaccccaccatctaccacctgagaaagaaactggtggacagcaccgacaaggccgacctgcggctgatctatctggccctggcccacatgatcaagttccggggccacttcctgatcgagggcgacctgaaccccgacaacagcgacgtggacaagctgttcatccagctggtgcagacctacaaccagctgttcgaggaaaaccccatcaacgccagcggcgtggacgccaaggccatcctgtctgccagactgagcaagagcagacggctggaaaatctgatcgcccagctgcccggcgagaagaagaatggcctgttcggcaacctgattgccctgagcctgggcctgacccccaacttcaagagcaacttcgacctggccgaggatgccaaactgcagctgagcaaggacacctacgacgacgacctggacaacctgctggcccagatcggcgaccagtacgccgacctgtttctggccgccaagaacctgtccgacgccatcctgctgagcgacatcctgagagtgaacaccgagatcaccaaggcccccctgagcgcctctatgatcaagagatacgacgagcaccaccaggacctgaccctgctgaaagctctcgtgcggcagcagctgcctgagaagtacaaagagattttcttcgaccagagcaagaacggctacgccggctacattgacggcggagccagccaggaagagttctacaagttcatcaagcccatcctggaaaagatggacggcaccgaggaactgctcgtgaagctgaacagagaggacctgctgcggaagcagcggaccttcgacaacggcagcatcccccaccagatccacctgggagagctgcacgccattctgcggcggcaggaagatttttacccattcctgaaggacaaccgggaaaagatcgagaagatcctgaccttccgcatcccctactacgtgggccctctggccaggggaaacagcagattcgcctggatgaccagaaagagcgaggaaaccatcaccccctggaacttcgaggaagtggtggacaagggcgcttccgcccagagcttcatcgagcggatgaccaacttcgataagaacctgcccaacgagaaggtgctgcccaagcacagcctgctgtacgagtacttcaccgtgtataacgagctgaccaaagtgaaatacgtgaccgagggaatgagaaagcccgccttcctgagcggcgagcagaaaaaggccatcgtggacctgctgttcaagaccaaccggaaagtgaccgtgaagcagctgaaagaggactacttcaagaaaatcgagtgcttcgactccgtggaaatctccggcgtggaagatcggttcaacgcctccctgggcacataccacgatctgctgaaaattatcaaggacaaggacttcctggacaatgaggaaaacgaggacattctggaagatatcgtgctgaccctgacactgtttgaggacagagagatgatcgaggaacggctgaaaacctatgcccacctgttcgacgacaaagtgatgaagcagctgaagcggcggagatacaccggctggggcaggctgagccggaagctgatcaacggcatccgggacaagcagtccggcaagacaatcctggatttcctgaagtccgacggcttcgccaacagaaacttcatgcagctgatccacgacgacagcctgacctttaaagaggacatccagaaagcccaggtgtccggccagggcgatagcctgcacgagcacattgccaatctggccggcagccccgccattaagaagggcatcctgcagacagtgaaggtggtggacgagctcgtgaaagtgatgggccggcacaagcccgagaacatcgtgatcgaaatggccagagagaaccagaccacccagaagggacagaagaacagccgcgagagaatgaagcggatcgaagagggcatcaaagagctgggcagccagatcctgaaagaacaccccgtggaaaacacccagctgcagaacgagaagctgtacctgtactacctgcagaatgggcgggatatgtacgtggaccaggaactggacatcaaccggctgtccgactacgatgtggacgccatcgtgcctcagagctttctgaaggacgactccatcgacaacaaggtgctgaccagaagcgacaagaaccggggcaagagcgacaacgtgccctccgaagaggtcgtgaagaagatgaagaactactggcggcagctgctgaacgccaagctgattacccagagaaagttcgacaatctgaccaaggccgagagaggcggcctgagcgaactggataaggccggcttcatcaagagacagctggtggaaacccggcagatcacaaagcacgtggcacagatcctggactcccggatgaacactaagtacgacgagaatgacaagctgatccgggaagtgaaagtgatcaccctgaagtccaagctggtgtccgatttccggaaggatttccagttttacaaagtgcgcgagatcaacaactaccaccacgcccacgacgcctacctgaacgccgtcgtgggaaccgccctgatcaaaaagtaccctaagctggaaagcgagttcgtgtacggcgactacaaggtgtacgacgtgcggaagatgatcgccaagagcgagcaggaaatcggcaaggctaccgccaagtacttcttctacagcaacatcatgaactttttcaagaccgagattaccctggccaacggcgagatccggaagcggcctctgatcgagacaaacggcgaaaccggggagatcgtgtgggataagggccgggattttgccaccgtgcggaaagtgctgagcatgccccaagtgaatatcgtgaaaaagaccgaggtgcagacaggcggcttcagcaaagagtctatcctgcccaagaggaacagcgataagctgatcgccagaaagaaggactgggaccctaagaagtacggcggcttcgacagccccaccgtggcctattctgtgctggtggtggccaaagtggaaaagggcaagtccaagaaactgaagagtgtgaaagagctgctggggatcaccatcatggaaagaagcagcttcgagaagaatcccatcgactttctggaagccaagggctacaaagaagtgaaaaaggacctgatcatcaagctgcctaagtactccctgttcgagctggaaaacggccggaagagaatgctggcctctgccggcgaactgcagaagggaaacgaactggccctgccctccaaatatgtgaacttcctgtacctggccagccactatgagaagctgaagggctcccccgaggataatgagcagaaacagctgtttgtggaacagcacaagcactacctggacgagatcatcgagcagatcagcgagttctccaagagagtgatcctggccgacgctaatctggacaaagtgctgtccgcctacaacaagcaccgggataagcccatcagagagcaggccgagaatatcatccacctgtttaccctgaccaatctgggagcccctgccgccttcaagtactttgacaccaccatcgaccggaagaggtacaccagcaccaaagaggtgctggacgccaccctgatccaccagagcatcaccggcctgtacgagacacggatcgacctgtctcagctgggaggcgacagccccaagaagaagagaaaggtgggagtcgacggatccagcggctccgagaccccaggcacatctgagagcgccacccctgagtccaccggtaacaaaaagcttgaggccgtcggaaccggaatcgaaccaaaagcaatgtcccagggtttggtgacatttggcgacgtggctgtcgatttttcccaggaagagtgggagtggctcaatcctatccagaggaacttgtaccggaaggtgatgctggagaattatagaaatttggcatcactggggttgtgcgttagcaaaccagatgttatatcttccctggaacagggaaaggagccctggagcgctgattacaaagatgatgacgataaagcccccaagaagaaaaggaaggtcccaaagaaaaaaagaaaggtgtga

SEQ ID NO: 1518 - protein, 2338 aa, Synthetic construct; identical to SEQ ID NO: 663

SEQ ID NO: 1519 - DNA, 7017 bp, Synthetic construct
  source 1..7017: mol_type = other DNA
atgggtaccatgccaaaaaagaagagaaaggtaccgaagaaaaaaagaaaggtatacaatcacgatcaggagttcgacccccctaaggtgtacccaccagtgcctgcagagaagaggaagccaatccgggtgctgagcctgtttgatggcatcgccaccggcctgctggtgctgaaggatctgggcatccaggtggaccggtacatcgcctccgaggtgtgcgaggattctatcaccgtgggcatggtgcgccaccagggcaagatcatgtatgtgggcgacgtgcggtccgtgacacagaagcacatccaggagtggggcccattcgatctggtgatcggcggcagcccctgtaatgacctgtccatcgtgaaccctgcaaggaagggactgtacgagggaaccggccggctgttctttgagttttatagactgctgcacgacgccaggcctaaggagggcgacgatagaccattcttttggctgttcgagaatgtggtggctatgggcgtgagcgataagagggacatctccaggtttctggagtctaaccccgtgatgatcgatgcaaaggaggtgtccgccgcacacagagccaggtatttctggggcaatctgccaggaatgaacaggccactggcaagcaccgtgaatgacaagctggagctgcaggagtgcctggagcacggaaggatcgccaagttttccaaggtgcgcacaatcaccacacggagcaattccatcaagcagggcaaggatcagcacttccccgtgttcatgaacgagaaggaggacatcctgtggtgtaccgagatggagagagtgttcggctttccagtgcactacacagacgtgtctaacatgagcaggctggcaaggcagcggctgctgggcagatcttggagcgtgcccgtgatcaggcacctgttcgcccctctgaaggagtattttgcctgcgtgagcagcggcaactccaatgccaacagccggggcccctctttcagctccggattggtgcctctgagcctgaggggctcccacatggcagcaatccccgccctggaccccgaggccgagcctagcatggacgtgatcctggtgggctctagcgagctgtcctctagcgtgtctccaggaaccggaagggatctgatcgcatacgaggtgaaggccaatcagcggaacatcgaggacatctgtatctgctgtggcagcctgcaggtgcacacacagcacccactgttcgagggaggaatctgcgcaccctgtaaggataagttcctggacgccctgtttctgtacgacgatgacggctaccagtcctattgctctatctgctgttccggcgagaccctgctgatctgcggcaatccagattgtacaaggtgctattgttttgagtgcgtggactctctggtgggaccaggcaccagcggaaaggtgcacgccatgtccaactgggtgtgctacctgtgcctgccatcctctcgcagcggactgctgcagcggagaaggaagtggagatcccagctgaaggccttctatgatagggagtctgagaaccccctggagatgtttgagaccgtgccagtgtggcgccggcagcccgtgagggtgctgagcctgttcgaggatatcaagaaggagctgacatccctgggctttctggagtccggctctgaccccggacagctgaagcacgtggtggatgtgaccgacacagtgcggaaggatgtggaggagtggggccctttcgacctggtgtacggagcaacccctccactgggacacacatgcgacagacccccttcttggtacctgttccagtttcaccgcctgctgcagtatgcaaggccaaagccaggcagccctagaccattcttttggatgttcgtggataatctggtgctgaacaaggaggatctggacgtggccagcaggtttctggagatggagccagtgaccatcccagacgtgcacggcggctccctgcagaatgccgtgcgcgtgtggtctaacatccctgccatcagaagcaggcactgggcactggtgagcgaggaggagctgtccctgctggcccagaataagcagagcagcaagctggccgccaagtggcctacaaagctggtgaagaactgcttcctgccactgcgggagtacttcaagtatttttccaccgagctgacatctagcctgggaggaccctcctctggcgccccaccacctagcggcggctcccctgccggctctccaaccagcacagaggagggcaccagcgagtccgccacaccagagtctggacctggcaccagcacagagccatccgagggctctgccccaggctctcctgcaggcagccctacctccaccgaagagggcaccagcacagagccttctgagggcagcgccccaggcacctctacagagccaagcgagctcgaggacaagaagtacagcatcggcctggccatcggcaccaactctgtgggctgggccgtgatcaccgacgagtacaaggtgcccagcaagaaattcaaggtgctgggcaacaccgaccggcacagcatcaagaagaacctgatcggagccctgctgttcgacagcggcgaaacagccgaggccacccggctgaagagaaccgccagaagaagatacaccagacggaagaaccggatctgctatctgcaagagatcttcagcaacgagatggccaaggtggacgacagcttcttccacagactggaagagtccttcctggtggaagaggataagaagcacgagcggcaccccatcttcggcaacatcgtggacgaggtggcctaccacgagaagtaccccaccatctaccacctgagaaagaaactggtggacagcaccgacaaggccgacctgcggctgatctatctggccctggcccacatgatcaagttccggggccacttcctgatcgagggcgacctgaaccccgacaacagcgacgtggacaagctgttcatccagctggtgcagacctacaaccagctgttcgaggaaaaccccatcaacgccagcggcgtggacgccaaggccatcctgtctgccagactgagcaagagcagacggctggaaaatctgatcgcccagctgcccggcgagaagaagaatggcctgttcggcaacctgattgccctgagcctgggcctgacccccaacttcaagagcaacttcgacctggccgaggatgccaaactgcagctgagcaaggacacctacgacgacgacctggacaacctgctggcccagatcggcgaccagtacgccgacctgtttctggccgccaagaacctgtccgacgccatcctgctgagcgacatcctgagagtgaacaccgagatcaccaaggcccccctgagcgcctctatgatcaagagatacgacgagcaccaccaggacctgaccctgctgaaagctctcgtgcggcagcagctgcctgagaagtacaaagagattttcttcgaccagagcaagaacggctacgccggctacattgacggcggagccagccaggaagagttctacaagttcatcaagcccatcctggaaaagatggacggcaccgaggaactgctcgtgaagctgaacagagaggacctgctgcggaagcagcggaccttcgacaacggcagcatcccccaccagatccacctgggagagctgcacgccattctgcggcggcaggaagatttttacccattcctgaaggacaaccgggaaaagatcgagaagatcctgaccttccgcatcccctactacgtgggccctctggccaggggaaacagcagattcgcctggatgaccagaaagagcgaggaaaccatcaccccctggaacttcgaggaagtggtggacaagggcgcttccgcccagagcttcatcgagcggatgaccaacttcgataagaacctgcccaacgagaaggtgctgcccaagcacagcctgctgtacgagtacttcaccgtgtataacgagctgaccaaagtgaaatacgtgaccgagggaatgagaaagcccgccttcctgagcggcgagcagaaaaaggccatcgtggacctgctgttcaagaccaaccggaaagtgaccgtgaagcagctgaaagaggactacttcaagaaaatcgagtgcttcgactccgtggaaatctccggcgtggaagatcggttcaacgcctccctgggcacataccacgatctgctgaaaattatcaaggacaaggacttcctggacaatgaggaaaacgaggacattctggaagatatcgtgctgaccctgacactgtttgaggacagagagatgatcgaggaacggctgaaaacctatgcccacctgttcgacgacaaagtgatgaagcagctgaagcggcggagatacaccggctggggcaggctgagccggaagctgatcaacggcatccgggacaagcagtccggcaagacaatcctggatttcctgaagtccgacggcttcgccaacagaaacttcatgcagctgatccacgacgacagcctgacctttaaagaggacatccagaaagcccaggtgtccggccagggcgatagcctgcacgagcacattgccaatctggccggcagccccgccattaagaagggcatcctgcagacagtgaaggtggtggacgagctcgtgaaagtgatgggccggcacaagcccgagaacatcgtgatcgaaatggccagagagaaccagaccacccagaagggacagaagaacagccgcgagagaatgaagcggatcgaagagggcatcaaagagctgggcagccagatcctgaaagaacaccccgtggaaaacacccagctgcagaacgagaagctgtacctgtactacctgcagaatgggcgggatatgtacgtggaccaggaactggacatcaaccggctgtccgactacgatgtggacgccatcgtgcctcagagctttctgaaggacgactccatcgacaacaaggtgctgaccagaagcgacaagaaccggggcaagagcgacaacgtgccctccgaagaggtcgtgaagaagatgaagaactactggcggcagctgctgaacgccaagctgattacccagagaaagttcgacaatctgaccaaggccgagagaggcggcctgagcgaactggataaggccggcttcatcaagagacagctggtggaaacccggcagatcacaaagcacgtggcacagatcctggactcccggatgaacactaagtacgacgagaatgacaagctgatccgggaagtgaaagtgatcaccctgaagtccaagctggtgtccgatttccggaaggatttccagttttacaaagtgcgcgagatcaacaactaccaccacgcccacgacgcctacctgaacgccgtcgtgggaaccgccctgatcaaaaagtaccctaagctggaaagcgagttcgtgtacggcgactacaaggtgtacgacgtgcggaagatgatcgccaagagcgagcaggaaatcggcaaggctaccgccaagtacttcttctacagcaacatcatgaactttttcaagaccgagattaccctggccaacggcgagatccggaagcggcctctgatcgagacaaacggcgaaaccggggagatcgtgtgggataagggccgggattttgccaccgtgcggaaagtgctgagcatgccccaagtgaatatcgtgaaaaagaccgaggtgcagacaggcggcttcagcaaagagtctatcctgcccaagaggaacagcgataagctgatcgccagaaagaaggactgggaccctaagaagtacggcggcttcgacagccccaccgtggcctattctgtgctggtggtggccaaagtggaaaagggcaagtccaagaaactgaagagtgtgaaagagctgctggggatcaccatcatggaaagaagcagcttcgagaagaatcccatcgactttctggaagccaagggctacaaagaagtgaaaaaggacctgatcatcaagctgcctaagtactccctgttcgagctggaaaacggccggaagagaatgctggcctctgccggcgaactgcagaagggaaacgaactggccctgccctccaaatatgtgaacttcctgtacctggccagccactatgagaagctgaagggctcccccgaggataatgagcagaaacagctgtttgtggaacagcacaagcactacctggacgagatcatcgagcagatcagcgagttctccaagagagtgatcctggccgacgctaatctggacaaagtgctgtccgcctacaacaagcaccgggataagcccatcagagagcaggccgagaatatcatccacctgtttaccctgaccaatctgggagcccctgccgccttcaagtactttgacaccaccatcgaccggaagaggtacaccagcaccaaagaggtgctggacgccaccctgatccaccagagcatcaccggcctgtacgagacacggatcgacctgtctcagctgggaggcgacagccccaagaagaagagaaaggtgggagtcgacggatccagcggctccgagaccccaggcacatctgagagcgccacccctgagtccaccggtatgaacaattcacaggggagagtgacattcgaagacgtgaccgtgaacttcacccagggagaatggcagcgcttgaacccagaacaaaggaacctctatcgggacgtgatgctggaaaactactcaaatttggtgagcgttgggcagggtgagaccactaagcctgacgtgatcctgagattggaacagggcaaggagccttggctcgaggaagaggaagtcctgggctcagggagggccgagaaaaacggtgatataggaggccagatatggaagcctaaggacgtcaaggagagcctgagcgctgattacaaagatgatgacgataaagcccccaagaagaaaaggaaggtcccaaagaaaaaaagaaaggtgtga

SEQ ID NO: 1520 - protein, 2318 aa, Synthetic construct; identical to SEQ ID NO: 662

SEQ ID NO: 1521-1522 - skipped (2 entries)

SEQ ID NO: 1523 - protein, 2295 aa, synthetic construct
MPKKKRKVPKKKRKVYNHDQEFDPPKVYPPVPAEKRKPIRVLSLFDGIATGLLVLKDLGIQVDRYIASEVCEDSITVGMVRHQGKIMYVGDVRSVTQKHIQEWGPFDLVIGGSPCNDLSIVNPARKGLYEGTGRLFFEFYRLLHDARPKEGDDRPFFWLFENVVAMGVSDKRDISRFLESNPVMIDAKEVSAAHRARYFWGNLPGMNRPLASTVNDKLELQECLEHGRIAKFSKVRTITTRSNSIKQGKDQHFPVFMNEKEDILWCTEMERVFGFPVHYTDVSNMSRLARQRLLGRSWSVPVIRHLFAPLKEYFACVSSGNSNANSRGPSFSSGLVPLSLRGSHMAAIPALDPEAEPSMDVILVGSSELSSSVSPGTGRDLIAYEVKANQRNIEDICICCGSLQVHTQHPLFEGGICAPCKDKFLDALFLYDDDGYQSYCSICCSGETLLICGNPDCTRCYCFECVDSLVGPGTSGKVHAMSNWVCYLCLPSSRSGLLQRRRKWRSQLKAFYDRESENPLEMFETVPVWRRQPVRVLSLFEDIKKELTSLGFLESGSDPGQLKHVVDVTDTVRKDVEEWGPFDLVYGATPPLGHTCDRPPSWYLFQFHRLLQYARPKPGSPRPFFWMFVDNLVLNKEDLDVASRFLEMEPVTIPDVHGGSLQNAVRVWSNIPAIRSRHWALVSEEELSLLAQNKQSSKLAAKWPTKLVKNCFLPLREYFKYFSTELTSSPGGPSSGAPPPSGGSPAGSPTSTEEGTSESATPESGPGTSTEPSEGSAPGSPAGSPTSTEEGTSTEPSEGSAPGTSTEPSELEDKKYSIGLAIGTNSVGWAVITDEYKVPSKKFKVLGNTDRHSIKKNLIGALLFDSGETAEATRLKRTARRRYTRRKNRICYLQEIFSNEMAKVDDSFFHRLEESFLVEEDKKHERHPIFGNIVDEVAYHEKYPTIYHLRKKLVDSTDKADLRLIYLALAHMIKFRGHFLIEGDLNPDNSDVDKLFIQLVQTYNQLFEENPINASGVDAKAILSARLSKSRRLENLIAQLPGEKKNGLFGNLIALSLGLTPNFKSNFDLAEDAKLQLSKDTYDDDLDNLLAQIGDQYADLFLAAKNLSDAILLSDILRVNTEITKAPLSASMIKRYDEHHQDLTLLKALVRQQLPEKYKEIFFDQSKNGYAGYIDGGASQEEFYKFIKPILEKMDGTEELLVKLNREDLLRKQRTFDNGSIPHQIHLGELHAILRRQEDFYPFLKDNREKIEKILTFRIPYYVGPLARGNSRFAWMTRKSEETITPWNFEEVVDKGASAQSFIERMTNFDKNLPNEKVLPKHSLLYEYFTVYNELTKVKYVTEGMRKPAFLSGEQKKAIVDLLFKTNRKVTVKQLKEDYFKKIECFDSVEISGVEDRFNASLGTYHDLLKIIKDKDFLDNEENEDILEDIVLTLTLFEDREMIEERLKTYAHLFDDKVMKQLKRRRYTGWGRLSRKLINGIRDKQSGKTILDFLKSDGFANRNFMQLIHDDSLTFKEDIQKAQVSGQGDSLHEHIANLAGSPAIKKGILQTVKVVDELVKVMGRHKPENIVIEMARENQTTQKGQKNSRERMKRIEEGIKELGSQILKEHPVENTQLQNEKLYLYYLQNGRDMYVDQELDINRLSDYDVDAIVPQSFLKDDSIDNKVLTRSDKNRGKSDNVPSEEVVKKMKNYWRQLLNAKLITQRKFDNLTKAERGGLSELDKAGFIKRQLVETRQITKHVAQILDSRMNTKYDENDKLIREVKVITLKSKLVSDFRKDFQFYKVREINNYHHAHDAYLNAVVGTALIKKYPKLESEFVYGDYKVYDVRKMIAKSEQEIGKATAKYFFYSNIMNFFKTEITLANGEIRKRPLIETNGETGEIVWDKGRDFATVRKVLSMPQVNIVKKTEVQTGGFSKESILPKRNSDKLIARKKDWDPKKYGGFDSPTVAYSVLVVAKVEKGKSKKLKSVKELLGITIMERSSFEKNPIDFLEAKGYKEVKKDLIIKLPKYSLFELENGRKRMLASAGELQKGNELALPSKYVNFLYLASHYEKLKGSPEDNEQKQLFVEQHKHYLDEIIEQISEFSKRVILADANLDKVLSAYNKHRDKPIREQAENIIHLFTLTNLGAPAAFKYFDTTIDRKRYTSTKEVLDATLIHQSITGLYETRIDLSQLGGDSPKKKRKVGVDGSSGSETPGTSESATPESRTLVTFKDVFVDFTREEWKLLDTAQQIVYRNVMLENYKNLVSLGYQLTKPDVILRLEKGEEPSADYKDDDDKAPKKKRKVPKKKRKV

SEQ ID NO: 1524 - protein, 6897 aa, synthetic construct
ATGGGTACCATGCCAAAAAAGAAGAGAAAGGTACCGAAGAAAAAAAGAAAGGTATACAATCACGATCAGGAGTTCGACCCCCCTAAGGTGTACCCACCAGTGCCTGCAGAGAAGAGGAAGCCAATCCGGGTGCTGAGCCTGTTTGATGGCATCGCCACCGGCCTGCTGGTGCTGAAGGATCTGGGCATCCAGGTGGACCGGTACATCGCCTCCGAGGTGTGCGAGGATTCTATCACCGTGGGCATGGTGCGCCACCAGGGCAAGATCATGTATGTGGGCGACGTGCGGTCCGTGACACAGAAGCACATCCAGGAGTGGGGCCCATTCGATCTGGTGATCGGCGGCAGCCCCTGTAATGACCTGTCCATCGTGAACCCTGCAAGGAAGGGACTGTACGAGGGAACCGGCCGGCTGTTCTTTGAGTTTTATAGACTGCTGCACGACGCCAGGCCTAAGGAGGGCGACGATAGACCATTCTTTTGGCTGTTCGAGAATGTGGTGGCTATGGGCGTGAGCGATAAGAGGGACATCTCCAGGTTTCTGGAGTCTAACCCCGTGATGATCGATGCAAAGGAGGTGTCCGCCGCACACAGAGCCAGGTATTTCTGGGGCAATCTGCCAGGAATGAACAGGCCACTGGCAAGCACCGTGAATGACAAGCTGGAGCTGCAGGAGTGCCTGGAGCACGGAAGGATCGCCAAGTTTTCCAAGGTGCGCACAATCACCACACGGAGCAATTCCATCAAGCAGGGCAAGGATCAGCACTTCCCCGTGTTCATGAACGAGAAGGAGGACATCCTGTGGTGTACCGAGATGGAGAGAGTGTTCGGCTTTCCAGTGCACTACACAGACGTGTCTAACATGAGCAGGCTGGCAAGGCAGCGGCTGCTGGGCAGATCTTGGAGCGTGCCCGTGATCAGGCACCTGTTCGCCCCTCTGAAGGAGTATTTTGCCTGCGTGAGCAGCGGCAACTCCAATGCCAACAGCCGGGGCCCCTCTTTCAGCTCCGGATTGGTGCCTCTGAGCCTGAGGGGCTCCCACATGGCAGCAATCCCCGCCCTGGACCCCGAGGCCGAGCCTAGCATGGACGTGATCCTGGTGGGCTCTAGCGAGCTGTCCTCTAGCGTGTCTCCAGGAACCGGAAGGGATCTGATCGCATACGAGGTGAAGGCCAATCAGCGGAACATCGAGGACATCTGTATCTGCTGTGGCAGCCTGCAGGTGCACACACAGCACCCACTGTTCGAGGGAGGAATCTGCGCACCCTGTAAGGATAAGTTCCTGGACGCCCTGTTTCTGTACGACGATGACGGCTACCAGTCCTATTGCTCTATCTGCTGTTCCGGCGAGACCCTGCTGATCTGCGGCAATCCAGATTGTACAAGGTGCTATTGTTTTGAGTGCGTGGACTCTCTGGTGGGACCAGGCACCAGCGGAAAGGTGCACGCCATGTCCAACTGGGTGTGCTACCTGTGCCTGCCATCCTCTCGCAGCGGACTGCTGCAGCGGAGAAGGAAGTGGAGATCCCAGCTGAAGGCCTTCTATGATAGGGAGTCTGAGAACCCCCTGGAGATGTTTGAGACCGTGCCAGTGTGGCGCCGGCAGCCCGTGAGGGTGCTGAGCCTGTTCGAGGATATCAAGAAGGAGCTGACATCCCTGGGCTTTCTGGAGTCCGGCTCTGACCCCGGACAGCTGAAGCACGTGGTGGATGTGACCGACACAGTGCGGAAGGATGTGGAGGAGTGGGGCCCTTTCGACCTGGTGTACGGAGCAACCCCTCCACTGGGACACACATGCGACAGACCCCCTTCTTGGTACCTGTTCCAGTTTCACCGCCTGCTGCAGTATGCAAGGCCAAAGCCAGGCAGCCCTAGACCATTCTTTTGGATGTTCGTGGATAATCTGGTGCTGAACAAGGAGGATCTGGACGTGGCCAGCAGGTTTCTGGAGATGGAGCCAGTGACCATCCCAGACGTGCACGGCGGCTCCCTGCAGAATGCCGTGCGCGTGTGGTCTAACATCCCTGCCATCAGAAGCAGGCACTGGGCACTGGTGAGCGAGGAGGAGCTGTCCCTGCTGGCCCAGAATAAGCAGAGCAGCAAGCTGGCCGCCAAGTGGCCTACAAAGCTGGTGAAGAACTGCTTCCTGCCACTGCGGGAGTACTTCAAGTATTTTTCCACCGAGCTGACATCTAGCCCCGGAGGACCCTCCTCTGGCGCCCCACCACCTAGCGGCGGCTCCCCTGCCGGCTCTCCAACCAGCACAGAGGAGGGCACCAGCGAGTCCGCCACACCAGAGTCTGGACCTGGCACCAGCACAGAGCCATCCGAGGGCTCTGCCCCAGGCTCTCCTGCAGGCAGCCCTACCTCCACCGAAGAGGGCACCAGCACAGAGCCTTCTGAGGGCAGCGCCCCAGGCACCTCTACAGAGCCAAGCGAGCTCGAGGACAAGAAGTACAGCATCGGCCTGGCCATCGGCACCAACTCTGTGGGCTGGGCCGTGATCACCGACGAGTACAAGGTGCCCAGCAAGAAATTCAAGGTGCTGGGCAACACCGACCGGCACAGCATCAAGAAGAACCTGATCGGAGCCCTGCTGTTCGACAGCGGCGAAACAGCCGAGGCCACCCGGCTGAAGAGAACCGCCAGAAGAAGATACACCAGACGGAAGAACCGGATCTGCTATCTGCAAGAGATCTTCAGCAACGAGATGGCCAAGGTGGACGACAGCTTCTTCCACAGACTGGAAGAGTCCTTCCTGGTGGAAGAGGATAAGAAGCACGAGCGGCACCCCATCTTCGGCAACATCGTGGACGAGGTGGCCTACCACGAGAAGTACCCCACCATCTACCACCTGAGAAAGAAACTGGTGGACAGCACCGACAAGGCCGACCTGCGGCTGATCTATCTGGCCCTGGCCCACATGATCAAGTTCCGGGGCCACTTCCTGATCGAGGGCGACCTGAACCCCGACAACAGCGACGTGGACAAGCTGTTCATCCAGCTGGTGCAGACCTACAACCAGCTGTTCGAGGAAAACCCCATCAACGCCAGCGGCGTGGACGCCAAGGCCATCCTGTCTGCCAGACTGAGCAAGAGCAGACGGCTGGAAAATCTGATCGCCCAGCTGCCCGGCGAGAAGAAGAATGGCCTGTTCGGCAACCTGATTGCCCTGAGCCTGGGCCTGACCCCCAACTTCAAGAGCAACTTCGACCTGGCCGAGGATGCCAAACTGCAGCTGAGCAAGGACACCTACGACGACGACCTGGACAACCTGCTGGCCCAGATCGGCGACCAGTACGCCGACCTGTTTCTGGCCGCCAAGAACCTGTCCGACGCCATCCTGCTGAGCGACATCCTGAGAGTGAACACCGAGATCACCAAGGCCCCCCTGAGCGCCTCTATGATCAAGAGATACGACGAGCACCACCAGGACCTGACCCTGCTGAAAGCTCTCGTGCGGCAGCAGCTGCCTGAGAAGTACAAAGAGATTTTCTTCGACCAGAGCAAGAACGGCTACGCCGGCTACATTGACGGCGGAGCCAGCCAGGAAGAGTTCTACAAGTTCATCAAGCCCATCCTGGAAAAGATGGACGGCACCGAGGAACTGCTCGTGAAGCTGAACAGAGAGGACCTGCTGCGGAAGCAGCGGACCTTCGACAACGGCAGCATCCCCCACCAGATCCACCTGGGAGAGCTGCACGCCATTCTGCGGCGGCAGGAAGATTTTTACCCATTCCTGAAGGACAACCGGGAAAAGATCGAGAAGATCCTGACCTTCCGCATCCCCTACTACGTGGGCCCTCTGGCCAGGGGAAACAGCAGATTCGCCTGGATGACCAGAAAGAGCGAGGAAACCATCACCCCCTGGAACTTCGAGGAAGTGGTGGACAAGGGCGCTTCCGCCCAGAGCTTCATCGAGCGGATGACCAACTTCGATAAGAACCTGCCCAACGAGAAGGTGCTGCCCAAGCACAGCCTGCTGTACGAGTACTTCACCGTGTATAACGAGCTGACCAAAGTGAAATACGTGACCGAGGGAATGAGAAAGCCCGCCTTCCTGAGCGGCGAGCAGAAAAAGGCCATCGTGGACCTGCTGTTCAAGACCAACCGGAAAGTGACCGTGAAGCAGCTGAAAGAGGACTACTTCAAGAAAATCGAGTGCTTCGACTCCGTGGAAATCTCCGGCGTGGAAGATCGGTTCAACGCCTCCCTGGGCACATACCACGATCTGCTGAAAATTATCAAGGACAAGGACTTCCTGGACAATGAGGAAAACGAGGACATTCTGGAAGATATCGTGCTGACCCTGACACTGTTTGAGGACAGAGAGATGATCGAGGAACGGCTGAAAACCTATGCCCACCTGTTCGACGACAAAGTGATGAAGCAGCTGAAGCGGCGGAGATACACCGGCTGGGGCAGGCTGAGCCGGAAGCTGATCAACGGCATCCGGGACAAGCAGTCCGGCAAGACAATCCTGGATTTCCTGAAGTCCGACGGCTTCGCCAACAGAAACTTCATGCAGCTGATCCACGACGACAGCCTGACCTTTAAAGAGGACATCCAGAAAGCCCAGGTGTCCGGCCAGGGCGATAGCCTGCACGAGCACATTGCCAATCTGGCCGGCAGCCCCGCCATTAAGAAGGGCATCCTGCAGACAGTGAAGGTGGTGGACGAGCTCGTGAAAGTGATGGGCCGGCACAAGCCCGAGAACATCGTGATCGAAATGGCCAGAGAGAACCAGACCACCCAGAAGGGACAGAAGAACAGCCGCGAGAGAATGAAGCGGATCGAAGAGGGCATCAAAGAGCTGGGCAGCCAGATCCTGAAAGAACACCCCGTGGAAAACACCCAGCTGCAGAACGAGAAGCTGTACCTGTACTACCTGCAGAATGGGCGGGATATGTACGTGGACCAGGAACTGGACATCAACCGGCTGTCCGACTACGATGTGGACGCCATCGTGCCTCAGAGCTTTCTGAAGGACGACTCCATCGACAACAAGGTGCTGACCAGAAGCGACAAGAACCGGGGCAAGAGCGACAACGTGCCCTCCGAAGAGGTCGTGAAGAAGATGAAGAACTACTGGCGGCAGCTGCTGAACGCCAAGCTGATTACCCAGAGAAAGTTCGACAATCTGACCAAGGCCGAGAGAGGCGGCCTGAGCGAACTGGATAAGGCCGGCTTCATCAAGAGACAGCTGGTGGAAACCCGGCAGATCACAAAGCACGTGGCACAGATCCTGGACTCCCGGATGAACACTAAGTACGACGAGAATGACAAGCTGATCCGGGAAGTGAAAGTGATCACCCTGAAGTCCAAGCTGGTGTCCGATTTCCGGAAGGATTTCCAGTTTTACAAAGTGCGCGAGATCAACAACTACCACCACGCCCACGACGCCTACCTGAACGCCGTCGTGGGAACCGCCCTGATCAAAAAGTACCCTAAGCTGGAAAGCGAGTTCGTGTACGGCGACTACAAGGTGTACGACGTGCGGAAGATGATCGCCAAGAGCGAGCAGGAAATCGGCAAGGCTACCGCCAAGTACTTCTTCTACAGCAACATCATGAACTTTTTCAAGACCGAGATTACCCTGGCCAACGGCGAGATCCGGAAGCGGCCTCTGATCGAGACAAACGGCGAAACCGGGGAGATCGTGTGGGATAAGGGCCGGGATTTTGCCACCGTGCGGAAAGTGCTGAGCATGCCCCAAGTGAATATCGTGAAAAAGACCGAGGTGCAGACAGGCGGCTTCAGCAAAGAGTCTATCCTGCCCAAGAGGAACAGCGATAAGCTGATCGCCAGAAAGAAGGACTGGGACCCTAAGAAGTACGGCGGCTTCGACAGCCCCACCGTGGCCTATTCTGTGCTGGTGGTGGCCAAAGTGGAAAAGGGCAAGTCCAAGAAACTGAAGAGTGTGAAAGAGCTGCTGGGGATCACCATCATGGAAAGAAGCAGCTTCGAGAAGAATCCCATCGACTTTCTGGAAGCCAAGGGCTACAAAGAAGTGAAAAAGGACCTGATCATCAAGCTGCCTAAGTACTCCCTGTTCGAGCTGGAAAACGGCCGGAAGAGAATGCTGGCCTCTGCCGGCGAACTGCAGAAGGGAAACGAACTGGCCCTGCCCTCCAAATATGTGAACTTCCTGTACCTGGCCAGCCACTATGAGAAGCTGAAGGGCTCCCCCGAGGATAATGAGCAGAAACAGCTGTTTGTGGAACAGCACAAGCACTACCTGGACGAGATCATCGAGCAGATCAGCGAGTTCTCCAAGAGAGTGATCCTGGCCGACGCTAATCTGGACAAAGTGCTGTCCGCCTACAACAAGCACCGGGATAAGCCCATCAGAGAGCAGGCCGAGAATATCATCCACCTGTTTACCCTGACCAATCTGGGAGCCCCTGCCGCCTTCAAGTACTTTGACACCACCATCGACCGGAAGAGGTACACCAGCACCAAAGAGGTGCTGGACGCCACCCTGATCCACCAGAGCATCACCGGCCTGTACGAGACACGGATCGACCTGTCTCAGCTGGGAGGCGACAGCCCCAAGAAGAAGAGAAAGGTGGGAGTCGACGGATCCAGCGGCTCCGAGACCCCAGGCACATCTGAGAGCGCCACCCCTGAGTCCCGGACCCTGGTGACCTTCAAGGATGTATTTGTGGACTTCACCAGGGAGGAGTGGAAGCTGCTGGACACTGCTCAGCAGATCGTGTACAGAAATGTGATGCTGGAGAACTATAAGAACCTGGTTTCCTTGGGTTATCAGCTTACTAAGCCAGATGTGATCCTCCGGTTGGAGAAGGGAGAAGAGCCCAGCGCTGATTACAAAGATGATGACGATAAAGCCCCAAAAAAGAAGAGAAAGGTACCGAAGAAAAAAAGAAAGGTCTGA

SEQ ID NO: 1525 - protein, 2090 aa, synthetic construct
MGTMNHDQEFDPPKVYPPVPAEKRKPIRVLSLFDGIATGLLVLKDLGIQVDRYIASEVCEDSITVGMVRHQGKIMYVGDVRSVTQKHIQEWGPFDLVIGGSPCNDLSIVNPARKGLYEGTGRLFFEFYRLLHDARPKEGDDRPFFWLFENVVAMGVSDKRDISRFLESNPVMIDAKEVSAAHRARYFWGNLPGMNRPLASTVNDKLELQECLEHGRIAKFSKVRTITTRSNSIKQGKDQHFPVFMNEKEDILWCTEMERVFGFPVHYTDVSNMSRLARQRLLGRSWSVPVIRHLFAPLKEYFACVSSGNSNANSRGPSFSSGLVPLSLRGSHMGPMEIYKTVSAWKRQPVRVLSLFRNIDKVLKSLGFLESGSGSGGGTLKYVEDVTNVVRRDVEKWGPFDLVYGSTQPLGSSCDRCPGWYMFQFHRILQYALPRQESQRPFFWIFMDNLLLTEDDQETTTRFLQTEAVTLQDVRGRDYQNAMRVWSNIPGLKSKHAPLTPKEEEYLQAQVRSRSKLDAPKVDLLVKNCLLPLREYFKYFSQNSLPLGGPSSGAPPPSGGSPAGSPTSTEEGTSESATPESGPGTSTEPSEGSAPGSPAGSPTSTEEGTSTEPSEGSAPGTSTEPSEPKKKRKVYMDKKYSIGLAIGTNSVGWAVITDEYKVPSKKFKVLGNTDRHSIKKNLIGALLFDSGETAEATRLKRTARRRYTRRKNRICYLQEIFSNEMAKVDDSFFHRLEESFLVEEDKKHERHPIFGNIVDEVAYHEKYPTIYHLRKKLVDSTDKADLRLIYLALAHMIKFRGHFLIEGDLNPDNSDVDKLFIQLVQTYNQLFEENPINASGVDAKAILSARLSKSRRLENLIAQLPGEKKNGLFGNLIALSLGLTPNFKSNFDLAEDAKLQLSKDTYDDDLDNLLAQIGDQYADLFLAAKNLSDAILLSDILRVNTEITKAPLSASMIKRYDEHHQDLTLLKALVRQQLPEKYKEIFFDQSKNGYAGYIDGGASQEEFYKFIKPILEKMDGTEELLVKLNREDLLRKQRTFDNGSIPHQIHLGELHAILRRQEDFYPFLKDNREKIEKILTFRIPYYVGPLARGNSRFAWMTRKSEETITPWNFEEVVDKGASAQSFIERMTNFDKNLPNEKVLPKHSLLYEYFTVYNELTKVKYVTEGMRKPAFLSGEQKKAIVDLLFKTNRKVTVKQLKEDYFKKIECFDSVEISGVEDRFNASLGTYHDLLKIIKDKDFLDNEENEDILEDIVLTLTLFEDREMIEERLKTYAHLFDDKVMKQLKRRRYTGWGRLSRKLINGIRDKQSGKTILDFLKSDGFANRNFMQLIHDDSLTFKEDIQKAQVSGQGDSLHEHIANLAGSPAIKKGILQTVKVVDELVKVMGRHKPENIVIEMARENQTTQKGQKNSRERMKRIEEGIKELGSQILKEHPVENTQLQNEKLYLYYLQNGRDMYVDQELDINRLSDYDVDAIVPQSFLKDDSIDNKVLTRSDKNRGKSDNVPSEEVVKKMKNYWRQLLNAKLITQRKFDNLTKAERGGLSELDKAGFIKRQLVETRQITKHVAQILDSRMNTKYDENDKLIREVKVITLKSKLVSDFRKDFQFYKVREINNYHHAHDAYLNAVVGTALIKKYPKLESEFVYGDYKVYDVRKMIAKSEQEIGKATAKYFFYSNIMNFFKTEITLANGEIRKRPLIETNGETGEIVWDKGRDFATVRKVLSMPQVNIVKKTEVQTGGFSKESILPKRNSDKLIARKKDWDPKKYGGFDSPTVAYSVLVVAKVEKGKSKKLKSVKELLGITIMERSSFEKNPIDFLEAKGYKEVKKDLIIKLPKYSLFELENGRKRMLASAGELQKGNELALPSKYVNFLYLASHYEKLKGSPEDNEQKQLFVEQHKHYLDEIIEQISEFSKRVILADANLDKVLSAYNKHRDKPIREQAENIIHLFTLTNLGAPAAFKYFDTTIDRKRYTSTKEVLDATLIHQSITGLYETRIDLSQLGGDPKKKRKVSGSETPGTSESATPESTGRTLVTFKDVFVDFTREEWKLLDTAQQIVYRNVMLENYKNLVSLGYQLTKPDVILRLEKGEEP

SEQ ID NO: 1526 - protein, 6273 aa, synthetic construct
ATGGGTACCATGAACCATGACCAGGAATTTGACCCCCCAAAGGTTTACCCACCTGTGCCAGCTGAGAAGAGGAAGCCCATCCGCGTGCTGTCTCTCTTTGATGGGATTGCTACAGGGCTCCTGGTGCTGAAGGACCTGGGCATCCAAGTGGACCGCTACATTGCCTCCGAGGTGTGTGAGGACTCCATCACGGTGGGCATGGTGCGGCACCAGGGAAAGATCATGTACGTCGGGGACGTCCGCAGCGTCACACAGAAGCATATCCAGGAGTGGGGCCCATTCGACCTGGTGATTGGAGGCAGTCCCTGCAATGACCTCTCCATTGTCAACCCTGCCCGCAAGGGACTTTATGAGGGTACTGGCCGCCTCTTCTTTGAGTTCTACCGCCTCCTGCATGATGCGCGGCCCAAGGAGGGAGATGATCGCCCCTTCTTCTGGCTCTTTGAGAATGTGGTGGCCATGGGCGTTAGTGACAAGAGGGACATCTCGCGATTTCTTGAGTCTAACCCCGTGATGATTGACGCCAAAGAAGTGTCTGCTGCACACAGGGCCCGTTACTTCTGGGGTAACCTTCCTGGCATGAACAGGCCTTTGGCATCCACTGTGAATGATAAGCTGGAGCTGCAAGAGTGTCTGGAGCACGGCAGAATAGCCAAGTTCAGCAAAGTGAGGACCATTACCACCAGGTCAAACTCTATAAAGCAGGGCAAAGACCAGCATTTCCCCGTCTTCATGAACGAGAAGGAGGACATCCTGTGGTGCACTGAAATGGAAAGGGTGTTTGGCTTCCCCGTCCACTACACAGACGTCTCCAACATGAGCCGCTTGGCGAGGCAGAGACTGCTGGGCCGATCGTGGAGCGTGCCGGTCATCCGCCACCTCTTCGCTCCGCTGAAGGAATATTTTGCTTGTGTGTCTAGCGGCAATAGTAACGCTAACAGCCGCGGGCCGAGCTTCAGCAGCGGCCTGGTGCCGTTAAGCTTGCGCGGCAGCCATATGGGCCCTATGGAGATATACAAGACAGTGTCTGCATGGAAGAGACAGCCAGTGCGGGTACTGAGCCTCTTCAGAAACATCGACAAGGTACTAAAGAGTTTGGGCTTCTTGGAAAGCGGTTCTGGTTCTGGGGGAGGAACGCTGAAGTACGTGGAAGATGTCACAAATGTCGTGAGGAGAGACGTGGAGAAATGGGGCCCCTTTGACCTGGTGTACGGCTCGACGCAGCCCCTAGGCAGCTCTTGTGATCGCTGTCCCGGCTGGTACATGTTCCAGTTCCACCGGATCCTGCAGTATGCGCTGCCTCGCCAGGAGAGTCAGCGGCCCTTCTTCTGGATATTCATGGACAATCTGCTGCTGACTGAGGATGACCAAGAGACAACTACCCGCTTCCTTCAGACAGAGGCTGTGACCCTCCAGGATGTCCGTGGCAGAGACTACCAGAATGCTATGCGGGTGTGGAGCAACATTCCAGGGCTGAAGAGCAAGCATGCGCCCCTGACCCCAAAGGAAGAAGAGTATCTGCAAGCCCAAGTCAGAAGCAGGAGCAAGCTGGACGCCCCGAAAGTTGACCTCCTGGTGAAGAACTGCCTTCTCCCGCTGAGAGAGTACTTCAAGTATTTTTCTCAAAACTCACTTCCTCTTGGAGGGCCGAGCTCTGGCGCACCCCCACCAAGTGGAGGGTCTCCTGCCGGGTCCCCAACATCTACTGAAGAAGGCACCAGCGAATCCGCAACGCCCGAGTCAGGCCCTGGTACCTCCACAGAACCATCTGAAGGTAGTGCGCCTGGTTCCCCAGCTGGAAGCCCTACTTCCACCGAAGAAGGCACGTCAACCGAACCAAGTGAAGGATCTGCCCCTGGGACCAGCACTGAACCATCTGAGCCAAAAAAGAAGAGAAAGGTATACATGGACAAGAAGTACAGCATCGGCCTGGCCATCGGCACCAACTCTGTGGGCTGGGCCGTGATCACCGACGAGTACAAGGTGCCCAGCAAGAAATTCAAGGTGCTGGGCAACACCGACCGGCACAGCATCAAGAAGAACCTGATCGGCGCCCTGCTGTTCGACAGCGGAGAAACAGCCGAGGCCACCCGGCTGAAGAGAACCGCCAGAAGAAGATACACCAGACGGAAGAACCGGATCTGCTATCTGCAAGAGATCTTCAGCAACGAGATGGCCAAGGTGGACGACAGCTTCTTCCACAGACTGGAAGAGTCCTTCCTGGTGGAAGAGGATAAGAAGCACGAGCGGCACCCCATCTTCGGCAACATCGTGGACGAGGTGGCCTACCACGAGAAGTACCCCACCATCTACCACCTGAGAAAGAAACTGGTGGACAGCACCGACAAGGCCGACCTGCGGCTGATCTATCTGGCCCTGGCCCACATGATCAAGTTCCGGGGCCACTTCCTGATCGAGGGCGACCTGAACCCCGACAACAGCGACGTGGACAAGCTGTTCATCCAGCTGGTGCAGACCTACAACCAGCTGTTCGAGGAAAACCCCATCAACGCCAGCGGCGTGGACGCCAAGGCCATCCTGTCTGCCAGACTGAGCAAGAGCAGACGGCTGGAAAATCTGATCGCCCAGCTGCCCGGCGAGAAGAAGAATGGCCTGTTCGGCAACCTGATTGCCCTGAGCCTGGGCCTGACCCCCAACTTCAAGAGCAACTTCGACCTGGCCGAGGATGCCAAACTGCAGCTGAGCAAGGACACCTACGACGACGACCTGGACAACCTGCTGGCCCAGATCGGCGACCAGTACGCCGACCTGTTTCTGGCCGCCAAGAACCTGTCCGACGCCATCCTGCTGAGCGACATCCTGAGAGTGAACACCGAGATCACCAAGGCCCCCCTGAGCGCCTCTATGATCAAGAGATACGACGAGCACCACCAGGACCTGACCCTGCTGAAAGCTCTCGTGCGGCAGCAGCTGCCTGAGAAGTACAAAGAGATTTTCTTCGACCAGAGCAAGAACGGCTACGCCGGCTACATCGATGGCGGAGCCAGCCAGGAAGAGTTCTACAAGTTCATCAAGCCCATCCTGGAAAAGATGGACGGCACCGAGGAACTGCTCGTGAAGCTGAACAGAGAGGACCTGCTGCGGAAGCAGCGGACCTTCGACAACGGCAGCATCCCCCACCAGATCCACCTGGGAGAGCTGCACGCCATTCTGCGGCGGCAGGAAGATTTTTACCCATTCCTGAAGGACAACCGGGAAAAGATCGAGAAGATCCTGACCTTCCGCATCCCCTACTACGTGGGCCCTCTGGCCAGGGGAAACAGCAGATTCGCCTGGATGACCAGAAAGAGCGAGGAAACCATCACCCCCTGGAACTTCGAGGAAGTGGTGGACAAGGGCGCCAGCGCCCAGAGCTTCATCGAGCGGATGACCAACTTCGATAAGAACCTGCCCAACGAGAAGGTGCTGCCCAAGCACAGCCTGCTGTACGAGTACTTCACCGTGTACAACGAGCTGACCAAAGTGAAATACGTGACCGAGGGAATGAGAAAGCCCGCCTTCCTGAGCGGCGAGCAGAAAAAAGCCATCGTGGACCTGCTGTTCAAGACCAACCGGAAAGTGACCGTGAAGCAGCTGAAAGAGGACTACTTCAAGAAAATCGAGTGCTTCGACTCCGTGGAAATCTCCGGCGTGGAAGATCGGTTCAACGCCTCCCTGGGCACATACCACGATCTGCTGAAAATTATCAAGGACAAGGACTTCCTGGACAATGAGGAAAACGAGGACATTCTGGAAGATATCGTGCTGACCCTGACACTGTTTGAGGACAGAGAGATGATCGAGGAACGGCTGAAAACCTATGCCCACCTGTTCGACGACAAAGTGATGAAGCAGCTGAAGCGGCGGAGATACACCGGCTGGGGCAGGCTGAGCCGGAAGCTGATCAACGGCATCCGGGACAAGCAGTCCGGCAAGACAATCCTGGATTTCCTGAAGTCCGACGGCTTCGCCAACAGAAACTTCATGCAGCTGATCCACGACGACAGCCTGACCTTTAAAGAGGACATCCAGAAAGCCCAGGTGTCCGGCCAGGGCGATAGCCTGCACGAGCACATTGCCAATCTGGCCGGCAGCCCCGCCATTAAGAAGGGCATCCTGCAGACAGTGAAGGTGGTGGACGAGCTCGTGAAAGTGATGGGCCGGCACAAGCCCGAGAACATCGTGATCGAAATGGCCAGAGAGAACCAGACCACCCAGAAGGGACAGAAGAACAGCCGCGAGAGAATGAAGCGGATCGAAGAGGGCATCAAAGAGCTGGGCAGCCAGATCCTGAAAGAACACCCCGTGGAAAACACCCAGCTGCAGAACGAGAAGCTGTACCTGTACTACCTGCAGAATGGGCGGGATATGTACGTGGACCAGGAACTGGACATCAACCGGCTGTCCGACTACGATGTGGACGCTATCGTGCCTCAGAGCTTTCTGAAGGACGACTCCATCGATAACAAAGTGCTGACTCGGAGCGACAAGAACCGGGGCAAGAGCGACAACGTGCCCTCCGAAGAGGTCGTGAAGAAGATGAAGAACTACTGGCGCCAGCTGCTGAATGCCAAGCTGATTACCCAGAGGAAGTTCGACAATCTGACCAAGGCCGAGAGAGGCGGCCTGAGCGAACTGGATAAGGCCGGCTTCATCAAGAGACAGCTGGTGGAAACCCGGCAGATCACAAAGCACGTGGCACAGATCCTGGACTCCCGGATGAACACTAAGTACGACGAGAACGACAAACTGATCCGGGAAGTGAAAGTGATCACCCTGAAGTCCAAGCTGGTGTCCGATTTCCGGAAGGATTTCCAGTTTTACAAAGTGCGCGAGATCAACAACTACCACCACGCCCACGACGCCTACCTGAACGCCGTCGTGGGAACCGCCCTGATCAAAAAGTACCCTAAGCTGGAAAGCGAGTTCGTGTACGGCGACTACAAGGTGTACGACGTGCGGAAGATGATCGCCAAGAGCGAGCAGGAAATCGGCAAGGCTACCGCCAAGTACTTCTTCTACAGCAACATCATGAACTTTTTCAAGACCGAGATTACCCTGGCCAACGGCGAGATCCGGAAGCGGCCTCTGATCGAGACAAACGGCGAAACAGGCGAGATCGTGTGGGATAAGGGCCGGGACTTTGCCACCGTGCGGAAAGTGCTGTCTATGCCCCAAGTGAATATCGTGAAAAAGACCGAGGTGCAGACAGGCGGCTTCAGCAAAGAGTCTATCCTGCCCAAGAGGAACAGCGACAAGCTGATCGCCAGAAAGAAGGACTGGGACCCTAAGAAGTACGGCGGCTTCGACAGCCCCACCGTGGCCTATTCTGTGCTGGTGGTGGCCAAAGTGGAAAAGGGCAAGTCCAAGAAACTGAAGAGTGTGAAAGAGCTGCTGGGGATCACCATCATGGAAAGAAGCAGCTTCGAGAAGAATCCCATCGACTTTCTGGAAGCCAAGGGCTACAAAGAAGTGAAAAAGGACCTGATCATCAAGCTGCCTAAGTACTCCCTGTTCGAGCTGGAAAACGGCCGGAAGAGAATGCTGGCCTCTGCCGGCGAACTGCAGAAGGGAAACGAACTGGCCCTGCCCTCCAAATATGTGAACTTCCTGTACCTGGCCAGCCACTATGAGAAGCTGAAGGGCTCCCCCGAGGATAATGAGCAGAAACAGCTGTTTGTGGAACAGCACAAACACTACCTGGACGAGATCATCGAGCAGATCAGCGAGTTCTCCAAGAGAGTGATCCTGGCCGACGCTAATCTGGACAAGGTGCTGAGCGCCTACAACAAGCACAGAGACAAGCCTATCAGAGAGCAGGCCGAGAATATCATCCACCTGTTTACCCTGACCAATCTGGGAGCCCCTGCCGCCTTCAAGTACTTTGACACCACCATCGACCGGAAGAGGTACACCAGCACCAAAGAGGTGCTGGACGCCACCCTGATCCACCAGAGCATCACCGGCCTGTACGAGACACGGATCGACCTGTCTCAGCTGGGAGGCGACCCAAAAAAGAAGAGAAAGGTAAGCGGAAGTGAGACCCCAGGTACATCCGAATCAGCAACGCCTGAAAGCACCGGTCGGACACTGGTGACCTTCAAGGATGTATTTGTGGACTTCACCAGGGAGGAGTGGAAGCTGCTGGACACTGCTCAGCAGATCGTGTACAGAAATGTGATGCTGGAGAACTATAAGAACCTGGTTTCCTTGGGTTATCAGCTTACTAAGCCAGATGTGATCCTCCGGTTGGAGAAGGGAGAAGAGCCCTGA

SEQ ID NO: 1527 - protein, 2153 aa, synthetic construct
MGTMPKKKRKVPKKKRKVYNHDQEFDPPKVYPPVPAEKRKPIRVLSLFDGIATGLLVLKDLGIQVDRYIASEVCEDSITVGMVRHQGKIMYVGDVRSVTQKHIQEWGPFDLVIGGSPCNDLSIVNPARKGLYEGTGRLFFEFYRLLHDARPKEGDDRPFFWLFENVVAMGVSDKRDISRFLESNPVMIDAKEVSAAHRARYFWGNLPGMNRPLASTVNDKLELQECLEHGRIAKFSKVRTITTRSNSIKQGKDQHFPVFMNEKEDILWCTEMERVFGFPVHYTDVSNMSRLARQRLLGRSWSVPVIRHLFAPLKEYFACVSSGNSNANSRGPSFSSGLVPLSLRGSHMGPMEIYKTVSAWKRQPVRVLSLFRNIDKVLKSLGFLESGSGSGGGTLKYVEDVTNVVRRDVEKWGPFDLVYGSTQPLGSSCDRCPGWYMFQFHRILQYALPRQESQRPFFWIFMDNLLLTEDDQETTTRFLQTEAVTLQDVRGRDYQNAMRVWSNIPGLKSKHAPLTPKEEEYLQAQVRSRSKLDAPKVDLLVKNCLLPLREYFKYFSQNSLPLGGPSSGAPPPSGGSPAGSPTSTEEGTSESATPESGPGTSTEPSEGSAPGSPAGSPTSTEEGTSTEPSEGSAPGTSTEPSEMDKKYSIGLAIGTNSVGWAVITDEYKVPSKKFKVLGNTDRHSIKKNLIGALLFDSGETAEATRLKRTARRRYTRRKNRICYLQEIFSNEMAKVDDSFFHRLEESFLVEEDKKHERHPIFGNIVDEVAYHEKYPTIYHLRKKLVDSTDKADLRLIYLALAHMIKFRGHFLIEGDLNPDNSDVDKLFIQLVQTYNQLFEENPINASGVDAKAILSARLSKSRRLENLIAQLPGEKKNGLFGNLIALSLGLTPNFKSNFDLAEDAKLQLSKDTYDDDLDNLLAQIGDQYADLFLAAKNLSDAILLSDILRVNTEITKAPLSASMIKRYDEHHQDLTLLKALVRQQLPEKYKEIFFDQSKNGYAGYIDGGASQEEFYKFIKPILEKMDGTEELLVKLNREDLLRKQRTFDNGSIPHQIHLGELHAILRRQEDFYPFLKDNREKIEKILTFRIPYYVGPLARGNSRFAWMTRKSEETITPWNFEEVVDKGASAQSFIERMTNFDKNLPNEKVLPKHSLLYEYFTVYNELTKVKYVTEGMRKPAFLSGEQKKAIVDLLFKTNRKVTVKQLKEDYFKKIECFDSVEISGVEDRFNASLGTYHDLLKIIKDKDFLDNEENEDILEDIVLTLTLFEDREMIEERLKTYAHLFDDKVMKQLKRRRYTGWGRLSRKLINGIRDKQSGKTILDFLKSDGFANRNFMQLIHDDSLTFKEDIQKAQVSGQGDSLHEHIANLAGSPAIKKGILQTVKVVDELVKVMGRHKPENIVIEMARENQTTQKGQKNSRERMKRIEEGIKELGSQILKEHPVENTQLQNEKLYLYYLQNGRDMYVDQELDINRLSDYDVDAIVPQSFLKDDSIDNKVLTRSDKNRGKSDNVPSEEVVKKMKNYWRQLLNAKLITQRKFDNLTKAERGGLSELDKAGFIKRQLVETRQITKHVAQILDSRMNTKYDENDKLIREVKVITLKSKLVSDFRKDFQFYKVREINNYHHAHDAYLNAVVGTALIKKYPKLESEFVYGDYKVYDVRKMIAKSEQEIGKATAKYFFYSNIMNFFKTEITLANGEIRKRPLIETNGETGEIVWDKGRDFATVRKVLSMPQVNIVKKTEVQTGGFSKESILPKRNSDKLIARKKDWDPKKYGGFDSPTVAYSVLVVAKVEKGKSKKLKSVKELLGITIMERSSFEKNPIDFLEAKGYKEVKKDLIIKLPKYSLFELENGRKRMLASAGELQKGNELALPSKYVNFLYLASHYEKLKGSPEDNEQKQLFVEQHKHYLDEIIEQISEFSKRVILADANLDKVLSAYNKHRDKPIREQAENIIHLFTLTNLGAPAAFKYFDTTIDRKRYTSTKEVLDATLIHQSITGLYETRIDLSQLGGDSGSETPGTSESATPESTGMNNSQGRVTFEDVTVNFTQGEWQRLNPEQRNLYRDVMLENYSNLVSVGQGETTKPDVILRLEQGKEPWLEEEEVLGSGRAEKNGDIGGQIWKPKDVKESLSADYKDDDDKAPKKKRKVPKKKRKV

SEQ ID NO: 1528 - protein, 6462 aa, unidentified
ATGGGTACCATGCCAAAAAAGAAGAGAAAGGTACCGAAGAAAAAAAGAAAGGTATACAACCATGACCAGGAATTCGACCCCCCAAAGGTTTACCCACCTGTGCCAGCTGAGAAGAGGAAGCCCATCCGCGTGCTGTCTCTCTTTGATGGGATTGCTACAGGGCTCCTGGTGCTGAAGGACCTGGGCATCCAAGTGGACCGCTACATTGCCTCCGAGGTGTGTGAGGACTCCATCACGGTGGGCATGGTGCGGCACCAGGGAAAGATCATGTACGTCGGGGACGTCCGCAGCGTCACACAGAAGCATATCCAGGAGTGGGGCCCATTCGACCTGGTGATTGGAGGCAGTCCCTGCAATGACCTCTCCATTGTCAACCCTGCCCGCAAGGGACTTTATGAGGGTACTGGCCGCCTCTTCTTTGAGTTCTACCGCCTCCTGCATGATGCGCGGCCCAAGGAGGGAGATGATCGCCCCTTCTTCTGGCTCTTTGAGAATGTGGTGGCCATGGGCGTTAGTGACAAGAGGGACATCTCGCGATTTCTTGAGTCTAACCCCGTGATGATTGACGCCAAAGAAGTGTCTGCTGCACACAGGGCCCGTTACTTCTGGGGTAACCTTCCTGGCATGAACAGGCCTTTGGCATCCACTGTGAATGATAAGCTGGAGCTGCAAGAGTGTCTGGAGCACGGCAGAATAGCCAAGTTCAGCAAAGTGAGGACCATTACCACCAGGTCAAACTCTATAAAGCAGGGCAAAGACCAGCATTTCCCCGTCTTCATGAACGAGAAGGAGGACATCCTGTGGTGCACTGAAATGGAAAGGGTGTTTGGCTTCCCCGTCCACTACACAGACGTCTCCAACATGAGCCGCTTGGCGAGGCAGAGACTGCTGGGCCGATCGTGGAGCGTGCCGGTCATCCGCCACCTCTTCGCTCCGCTGAAGGAATATTTTGCTTGTGTGTCTAGCGGCAATAGTAACGCTAACAGCCGCGGGCCGAGCTTCAGCAGCGGCCTGGTGCCGTTAAGCTTGCGCGGCAGCCATATGGGCCCTATGGAGATATACAAGACAGTGTCTGCATGGAAGAGACAGCCAGTGCGGGTACTGAGCCTCTTCAGAAACATCGACAAGGTACTAAAGAGTTTGGGCTTCTTGGAAAGCGGTTCTGGTTCTGGGGGAGGAACGCTGAAGTACGTGGAAGATGTCACAAATGTCGTGAGGAGAGACGTGGAGAAATGGGGCCCCTTTGACCTGGTGTACGGCTCGACGCAGCCCCTAGGCAGCTCTTGTGATCGCTGTCCCGGCTGGTACATGTTCCAGTTCCACCGGATCCTGCAGTATGCGCTGCCTCGCCAGGAGAGTCAGCGGCCCTTCTTCTGGATATTCATGGACAATCTGCTGCTGACTGAGGATGACCAAGAGACAACTACCCGCTTCCTTCAGACAGAGGCTGTGACCCTCCAGGATGTCCGTGGCAGAGACTACCAGAATGCTATGCGGGTGTGGAGCAACATTCCAGGGCTGAAGAGCAAGCATGCGCCCCTGACCCCAAAGGAAGAAGAGTATCTGCAAGCCCAAGTCAGAAGCAGGAGCAAGCTGGACGCCCCGAAAGTTGACCTCCTGGTGAAGAACTGCCTTCTCCCGCTGAGAGAGTACTTCAAGTATTTTTCTCAAAACTCACTTCCTCTTGGAGGGCCGAGCTCTGGCGCACCCCCACCAAGTGGAGGGTCTCCTGCCGGGTCCCCAACATCTACTGAAGAAGGCACCAGCGAATCCGCAACGCCCGAGTCAGGCCCTGGTACCTCCACAGAACCATCTGAAGGTAGTGCGCCTGGTTCCCCAGCTGGAAGCCCTACTTCCACCGAAGAAGGCACGTCAACCGAACCAAGTGAAGGATCTGCCCCTGGGACCAGCACTGAACCATCTGAGATGGACAAGAAGTACAGCATCGGCCTGGCCATCGGCACCAACTCTGTGGGCTGGGCCGTGATCACCGACGAGTACAAGGTGCCCAGCAAGAAATTCAAGGTGCTGGGCAACACCGACCGGCACAGCATCAAGAAGAACCTGATCGGCGCCCTGCTGTTCGACAGCGGAGAAACAGCCGAGGCCACCCGGCTGAAGAGAACCGCCAGAAGAAGATACACCAGACGGAAGAACCGGATCTGCTATCTGCAAGAGATCTTCAGCAACGAGATGGCCAAGGTGGACGACAGCTTCTTCCACAGACTGGAAGAGTCCTTCCTGGTGGAAGAGGATAAGAAGCACGAGCGGCACCCCATCTTCGGCAACATCGTGGACGAGGTGGCCTACCACGAGAAGTACCCCACCATCTACCACCTGAGAAAGAAACTGGTGGACAGCACCGACAAGGCCGACCTGCGGCTGATCTATCTGGCCCTGGCCCACATGATCAAGTTCCGGGGCCACTTCCTGATCGAGGGCGACCTGAACCCCGACAACAGCGACGTGGACAAGCTGTTCATCCAGCTGGTGCAGACCTACAACCAGCTGTTCGAGGAAAACCCCATCAACGCCAGCGGCGTGGACGCCAAGGCCATCCTGTCTGCCAGACTGAGCAAGAGCAGACGGCTGGAAAATCTGATCGCCCAGCTGCCCGGCGAGAAGAAGAATGGCCTGTTCGGCAACCTGATTGCCCTGAGCCTGGGCCTGACCCCCAACTTCAAGAGCAACTTCGACCTGGCCGAGGATGCCAAACTGCAGCTGAGCAAGGACACCTACGACGACGACCTGGACAACCTGCTGGCCCAGATCGGCGACCAGTACGCCGACCTGTTTCTGGCCGCCAAGAACCTGTCCGACGCCATCCTGCTGAGCGACATCCTGAGAGTGAACACCGAGATCACCAAGGCCCCCCTGAGCGCCTCTATGATCAAGAGATACGACGAGCACCACCAGGACCTGACCCTGCTGAAAGCTCTCGTGCGGCAGCAGCTGCCTGAGAAGTACAAAGAGATTTTCTTCGACCAGAGCAAGAACGGCTACGCCGGCTACATCGATGGCGGAGCCAGCCAGGAAGAGTTCTACAAGTTCATCAAGCCCATCCTGGAAAAGATGGACGGCACCGAGGAACTGCTCGTGAAGCTGAACAGAGAGGACCTGCTGCGGAAGCAGCGGACCTTCGACAACGGCAGCATCCCCCACCAGATCCACCTGGGAGAGCTGCACGCCATTCTGCGGCGGCAGGAAGATTTTTACCCATTCCTGAAGGACAACCGGGAAAAGATCGAGAAGATCCTGACCTTCCGCATCCCCTACTACGTGGGCCCTCTGGCCAGGGGAAACAGCAGATTCGCCTGGATGACCAGAAAGAGCGAGGAAACCATCACCCCCTGGAACTTCGAGGAAGTGGTGGACAAGGGCGCCAGCGCCCAGAGCTTCATCGAGCGGATGACCAACTTCGATAAGAACCTGCCCAACGAGAAGGTGCTGCCCAAGCACAGCCTGCTGTACGAGTACTTCACCGTGTACAACGAGCTGACCAAAGTGAAATACGTGACCGAGGGAATGAGAAAGCCCGCCTTCCTGAGCGGCGAGCAGAAAAAAGCCATCGTGGACCTGCTGTTCAAGACCAACCGGAAAGTGACCGTGAAGCAGCTGAAAGAGGACTACTTCAAGAAAATCGAGTGCTTCGACTCCGTGGAAATCTCCGGCGTGGAAGATCGGTTCAACGCCTCCCTGGGCACATACCACGATCTGCTGAAAATTATCAAGGACAAGGACTTCCTGGACAATGAGGAAAACGAGGACATTCTGGAAGATATCGTGCTGACCCTGACACTGTTTGAGGACAGAGAGATGATCGAGGAACGGCTGAAAACCTATGCCCACCTGTTCGACGACAAAGTGATGAAGCAGCTGAAGCGGCGGAGATACACCGGCTGGGGCAGGCTGAGCCGGAAGCTGATCAACGGCATCCGGGACAAGCAGTCCGGCAAGACAATCCTGGATTTCCTGAAGTCCGACGGCTTCGCCAACAGAAACTTCATGCAGCTGATCCACGACGACAGCCTGACCTTTAAAGAGGACATCCAGAAAGCCCAGGTGTCCGGCCAGGGCGATAGCCTGCACGAGCACATTGCCAATCTGGCCGGCAGCCCCGCCATTAAGAAGGGCATCCTGCAGACAGTGAAGGTGGTGGACGAGCTCGTGAAAGTGATGGGCCGGCACAAGCCCGAGAACATCGTGATCGAAATGGCCAGAGAGAACCAGACCACCCAGAAGGGACAGAAGAACAGCCGCGAGAGAATGAAGCGGATCGAAGAGGGCATCAAAGAGCTGGGCAGCCAGATCCTGAAAGAACACCCCGTGGAAAACACCCAGCTGCAGAACGAGAAGCTGTACCTGTACTACCTGCAGAATGGGCGGGATATGTACGTGGACCAGGAACTGGACATCAACCGGCTGTCCGACTACGATGTGGACGCTATCGTGCCTCAGAGCTTTCTGAAGGACGACTCCATCGATAACAAAGTGCTGACTCGGAGCGACAAGAACCGGGGCAAGAGCGACAACGTGCCCTCCGAAGAGGTCGTGAAGAAGATGAAGAACTACTGGCGCCAGCTGCTGAATGCCAAGCTGATTACCCAGAGGAAGTTCGACAATCTGACCAAGGCCGAGAGAGGCGGCCTGAGCGAACTGGATAAGGCCGGCTTCATCAAGAGACAGCTGGTGGAAACCCGGCAGATCACAAAGCACGTGGCACAGATCCTGGACTCCCGGATGAACACTAAGTACGACGAGAACGACAAACTGATCCGGGAAGTGAAAGTGATCACCCTGAAGTCCAAGCTGGTGTCCGATTTCCGGAAGGATTTCCAGTTTTACAAAGTGCGCGAGATCAACAACTACCACCACGCCCACGACGCCTACCTGAACGCCGTCGTGGGAACCGCCCTGATCAAAAAGTACCCTAAGCTGGAAAGCGAGTTCGTGTACGGCGACTACAAGGTGTACGACGTGCGGAAGATGATCGCCAAGAGCGAGCAGGAAATCGGCAAGGCTACCGCCAAGTACTTCTTCTACAGCAACATCATGAACTTTTTCAAGACCGAGATTACCCTGGCCAACGGCGAGATCCGGAAGCGGCCTCTGATCGAGACAAACGGCGAAACAGGCGAGATCGTGTGGGATAAGGGCCGGGACTTTGCCACCGTGCGGAAAGTGCTGTCTATGCCCCAAGTGAATATCGTGAAAAAGACCGAGGTGCAGACAGGCGGCTTCAGCAAAGAGTCTATCCTGCCCAAGAGGAACAGCGACAAGCTGATCGCCAGAAAGAAGGACTGGGACCCTAAGAAGTACGGCGGCTTCGACAGCCCCACCGTGGCCTATTCTGTGCTGGTGGTGGCCAAAGTGGAAAAGGGCAAGTCCAAGAAACTGAAGAGTGTGAAAGAGCTGCTGGGGATCACCATCATGGAAAGAAGCAGCTTCGAGAAGAATCCCATCGACTTTCTGGAAGCCAAGGGCTACAAAGAAGTGAAAAAGGACCTGATCATCAAGCTGCCTAAGTACTCCCTGTTCGAGCTGGAAAACGGCCGGAAGAGAATGCTGGCCTCTGCCGGCGAACTGCAGAAGGGAAACGAACTGGCCCTGCCCTCCAAATATGTGAACTTCCTGTACCTGGCCAGCCACTATGAGAAGCTGAAGGGCTCCCCCGAGGATAATGAGCAGAAACAGCTGTTTGTGGAACAGCACAAACACTACCTGGACGAGATCATCGAGCAGATCAGCGAGTTCTCCAAGAGAGTGATCCTGGCCGACGCTAATCTGGACAAGGTGCTGAGCGCCTACAACAAGCACAGAGACAAGCCTATCAGAGAGCAGGCCGAGAATATCATCCACCTGTTTACCCTGACCAATCTGGGAGCCCCTGCCGCCTTCAAGTACTTTGACACCACCATCGACCGGAAGAGGTACACCAGCACCAAAGAGGTGCTGGACGCCACCCTGATCCACCAGAGCATCACCGGCCTGTACGAGACACGGATCGACCTGTCTCAGCTGGGAGGCGACAGCGGAAGTGAGACCCCAGGTACATCCGAATCAGCAACGCCTGAAAGCACCGGTATGAACAATTCACAGGGGAGAGTGACATTCGAAGACGTGACCGTGAACTTCACCCAGGGAGAATGGCAGCGCTTGAACCCAGAACAAAGGAACCTCTATCGGGACGTGATGCTGGAAAACTACTCAAATTTGGTGAGCGTTGGGCAGGGTGAGACCACTAAGCCTGACGTGATCCTGAGATTGGAACAGGGCAAGGAGCCTTGGCTCGAGGAAGAGGAAGTCCTGGGCTCAGGGAGGGCCGAGAAAAACGGTGATATAGGAGGCCAGATATGGAAGCCTAAGGACGTCAAGGAGAGCCTGAGCGCTGATTACAAAGATGATGACGATAAAGCCCCAAAAAAGAAGAGAAAGGTACCGAAGAAAAAAAGAAAGGTCTGA

SEQ ID NO: 1529 - protein, 80 aa, synthetic construct; identical to SEQ ID NO: 395

SEQ ID NO: 1530 - protein, 80 aa, synthetic construct; identical to SEQ ID NO: 559